(19) United States
(12) Patent Application Publication
(10) Pub. No.: US 2024/0065213 A1
(43) Pub. Date: Feb. 29, 2024

(54) SOYBEAN PLANT WITH HEALTHIER PROPERTIES

(71) Applicant: BETTERSEEDS LTD, Givat Chen (IL)

(72) Inventors: Ido MARGALIT, Gan Yavne (IL); Tal SHERMAN, Rechovot (IL); Itamar GAFNI, Tel-Aviv (IL); Shira COREM, Sdei Hemed (IL)

(73) Assignee: BETTERSEEDS LTD, Givat Chen (IL)

(21) Appl. No.: 18/271,624

(22) PCT Filed: Jan. 12, 2022
(86) PCT No.: PCT/IL2022/050049

§ 371 Date: Jul. 10, 2023

Related U.S. Application Data
(60) Provisional application No. 63/136,214, filed on Jan. 12, 2021.

(51) Int. Cl. A01H 6/54; A01H 5/10

(52) U.S. Cl. CPC A01H 6/542; A01H 5/10

(57) ABSTRACT

The present invention discloses a modified Soybean plant, plant part, or plant cell exhibiting reduced phytoestrogen content and/or increased protein content, wherein the modified Soybean plant, plant part, or plant cell comprises one or more gene editing derived mutations in a least one gene involved in phytoestrogen biosynthesis and/or protein accumulation. Methods for producing the same are further disclosed.

### FIELD OF THE INVENTION

[0001] The present disclosure concerns a method of modulating the expression of phytoestrogen synthesis genes and genes involved in protein accumulation thus generating Soybean plants with lower phytoestrogen levels and seeds with higher protein content.

### BACKGROUND OF THE INVENTION

[0002] Phytoestrogens are present in certain edible plants and being most abundant in Soybean (soy); they are structurally and functionally analogous to the estrogens. Phytoestrogens have been applied for compensation of hormone deficiency during menopause. At the same time, soy products are used in infant food and other foodstuffs. Furthermore, soy is applied as animal fodder, so that residual phytoestrogens and their active metabolites such as equol can remain in meat and influence the hormonal balance of the consumers. There have been reports on modified gender-related behavior or feminization in humans as consequence of soy consumption. In animals, the intake of phytoestrogens was reported to impact fertility, sexual development and behavior. Feminizing effects in humans can be subtle and identifiable only statistically in large populations.

[0003] Soybean is considered as a health food by some, with claims of taming hot flashes, warding off osteoporosis, and protecting against hormonal cancers like breast and prostate.

[0004] At the same time, soy is excluded by others for fear that it may cause breast cancer, thyroid problems, and dementia.

[0005] As a species within the legume family, nutrition scientists often label Soybean as a food with potential of significant health benefits. However, due to contrary research that suggests possible negative effects of soy in certain situations, there has been a hesitancy to undoubtedly promote soy.

[0006] Part of the uncertainty is due to the complexity of soy's effects on the body. Soybean is unique in that it contains a high concentration of isoflavones, a type of plant estrogen (phytoestrogen) that is similar in function to human estrogen but with much weaker effects. Soy isoflavones can bind to estrogen receptors in the body and cause either weak estrogenic or anti-estrogenic activity. The two major soy isoflavones are called genistein and daidzein. Soy isoflavones and soy protein appear to have different actions in the body. Coumestrol is a phytochemical found in Soybean and has been reported to possess α-glucosidase inhibitory and strong estrogen-like activities.

[0007] Aside from their phytoestrogen content, soy foods are rich in nutrients including B vitamins, fiber, potassium, magnesium, and high-quality protein. Unlike some plant proteins, Soybean protein is considered a complete protein, containing all nine essential amino acids that the body cannot make which must be obtained from the diet. Soy foods are also classified as fermented or unfermented. Fermented means that the soy food has been cultured with beneficial bacteria, yeast, or mold. Some believe that fermenting soy improves its digestibility and absorption in the body, as this process partially breaks down soy's sugar and protein molecules.

[0008] Soy contains a high concentration of essential amino acids and is the main source of protein in our global food supply. Soybean production has more than doubled over the last two decades. Almost 80% of the world's Soybean crop is fed to livestock, especially for beef, chicken, egg and dairy production (milk, cheeses, butter, yogurt, etc). Soy oil is used for cooking and can also be found in margarine, chocolate, ice cream or baked goods, as well as in cosmetics or soaps.

[0009] But the rising demand for Soybean has come at a cost. To produce Soybean, land is being converted from forests, savannahs and grasslands, endangering valuable habitats and species whilst putting at risk traditional, local livelihoods. Millions of hectares of important habitat like the Amazon rainforest, the Cerrado, the Atlantic Forest, the Gran Chaco and Chiquitano in South America, or the Northern Great Plains of the U.S. are being ploughed up to make room for more Soybean production. In addition, Soybean production generates greenhouse gases that contribute to climate change. Soybean is an intensively grown crop, with high demands for resources: particularly energy, water, agrochemicals and soil. Any change from natural vegetation or grazing lands to crops is likely to increase soil erosion and change the hydrological cycle.

[0010] In lieu of the above, it is a long felt and unmet need to provide a novel method of effectively and consistently eliminating or reducing phytoestrogen compounds in a Soybean plant to make the plant healthier for consumption of humans and in particular children and adolescents. In addition in lieu of above, it is highly important to increase the protein content in the Soybean plant to compensate for the dwindling natural resources that is associated with growing Soybean.

### SUMMARY OF THE INVENTION

[0011] It is therefore one object of the present invention to disclose a modified Soybean plant, plant part, or plant cell exhibiting reduced phytoestrogen content and/or increased protein content, wherein the modified Soybean plant, plant part, or plant cell comprises one or more gene editing derived mutations in at least one gene selected from Glyma.01G239600, Glyma.01G228700, Glyma.10G010500.1, Glyma.11 G010500, Glyma.13 G173500, Glyma.14G005700, Glyma.17G064400, Glyma.16G149300, Glyma.17G036400, Glyma.17G036300, Glyma.19g135000, Glyma.11g011500, Glyma.02g005600, Glyma.17g030400 and Glyma19g030500.

[0012] It is a further object of the present invention to disclose the modified Soybean plant, plant part, or plant cell as defined in any of the above, wherein the plant, plant part, or plant cell is characterized by reduced phytoestrogen content and/or increased protein content, as compared to a Soybean plant absent of said one or more mutations.

[0013] It is a further object of the present invention to disclose the modified Soybean plant, plant part, or plant cell as defined in any of the above, wherein the plant, plant part, or plant cell is characterized by modulated or altered expression of said at least one gene as compared to a Soybean plant absent of said one or more mutations.

[0014] It is a further object of the present invention to disclose the modified Soybean plant, plant part, or plant cell as defined in any of the above, wherein the plant, plant part, or plant cell is characterized by reduced expression of said at least one gene as compared to a Soybean plant absent of said one or more mutations.

[0015] It is a further object of the present invention to disclose the modified Soybean plant, plant part, or plant cell as defined in any of the above, wherein the plant, plant part, or plant cell comprises one or more gene editing derived mutations in at least one gene selected from Glyma.01G239600, Glyma.01G228700, Glyma.10G010500.1, Glyma.11G010500, Glyma.13G173500, Glyma.14G005700, Glyma.17G064400, Glyma.16G149300, Glyma.11g011500, Glyma.02g005600, Glyma.17g030400 and Glyma19g030500 conferring reduced phytoestrogen content to said plant, plant part, or plant cell.

[0016] It is a further object of the present invention to disclose the modified Soybean plant, plant part, or plant cell as defined in any of the above, wherein the plant, plant part, or plant cell comprises one or more gene editing derived mutations in at least one gene selected from Glyma.17G036400, Glyma.17G036300 and Glyma.19g135000 conferring increased protein content in the Soybean plant, plant part, or plant cell.

[0017] It is a further object of the present invention to disclose the modified Soybean plant, plant part, or plant cell as defined in any of the above, wherein the Glyma.01G239600, Glyma.01G228700, Glyma.10G010500.1, Glyma.11 G010500, Glyma.13G173500, Glyma.14G005700, Glyma.17G064400, Glyma.16G149300, Glyma.17G036400, Glyma.17G036300, Glyma.19g135000, Glyma.11g011500, Glyma.02g005600, Glyma.17g030400 and Glyma19g030500 genes comprise a genomic sequence as set forth in SEQ ID NO: 1, 220, 454, 674, 1014, 1305, 1491, 1798, 2090, 2200, 2296, 2630, 2810, 2973 and 3043, respectively, or a functional variant thereof.

[0018] It is a further object of the present invention to disclose the modified Soybean plant, plant part, or plant cell as defined in any of the above, wherein the functional variant has at least 80% sequence identity to said SEQ ID NO: 1, 220, 454, 674, 1014, 1305, 1491, 1798, 2090, 2200, 2296, 2630, 2810, 2973 and 3043.

[0019] It is a further object of the present invention to disclose the modified Soybean plant, plant part, or plant cell as defined in any of the above, wherein the sequence of a target editing region within the at least one gene is selected from the group comprising a) a nucleic acid sequence encoding the polypeptide comprising a sequence selected from the group comprising SEQ ID NO: 3, 222, 456, 676, 1016, 1307, 1493, 1800, 2092, 2202, 2298, 2632, 2812, 2975 and 3045, b) a nucleic acid sequence comprising a sequence selected from the group comprising SEQ ID NO: 1, 220, 454, 674, 1014, 1305, 1491, 1798, 2090, 2200, 2296, 2630, 2810, 2973 and 3043, and c) a nucleic acid sequence having at least 80% sequence identity to at least 200 contiguous nucleotides of a nucleic acid sequence selected from the group comprising SEQ ID NO: 1, 220, 454, 674, 1014, 1305, 1491, 1798, 2090, 2200, 2296, 2630, 2810, 2973 and 3043.

[0020] It is a further object of the present invention to disclose the modified Soybean plant, plant part, or plant cell as defined in any of the above, wherein the one or more mutations is introduced in planta using targeted genome modification.

[0021] It is a further object of the present invention to disclose the modified Soybean plant, plant part, or plant cell as defined in any of the above, wherein the one or more mutations is introduced using CRISPR (Clustered Regularly Interspaced Short Palindromic Repeats) and CRISPR-associated (Cas) gene (CRISPR/Cas), Transcription activator-like effector nuclease (TALEN), Zinc Finger Nuclease (ZFN), meganuclease or any combination thereof.

[0022] It is a further object of the present invention to disclose the modified Soybean plant, plant part, or plant cell as defined in any of the above, wherein said Cas gene is selected from the group consisting of Cas3, Cas4, Cas5, Cas5e (or CasD), Cas6, Cas6e, Cas6f, Cas7, Cas8a1, Cas8a2, Cas8b, Cas8c, Cas9, Cas10, Cast10d, Cas12, Cas13, Cas14, CasX, CasY, CasF, CasG, CasH, Csy1, Csy2, Csy3, Cse1 (or CasA), Cse2 (or CasB), Cse3 (or CasE), Cse4 (or CasC), Csc1, Csc2, Csa5, Csn1, Csn2, Csm2, Csm3, Csm4, Csm5, Csm6, Cmr1, Cmr3, Cmr4, Cmr5, Cmr6, Cpf1, Csb1, Csb2, Csb3, Csx17, Csx14, Csx10, Csx16, CsaX, Csx3, Csz1, Csx15, Csf1, Csf2, Csf3, Csf4, and Cu1966 and any combination thereof.

[0023] It is a further object of the present invention to disclose the modified Soybean plant, plant part, or plant cell as defined in any of the above, wherein the at least one mutated gene is a CRISPR/Cas9-induced heritable mutated allele.

[0024] It is a further object of the present invention to disclose the modified Soybean plant, plant part, or plant cell as defined in any of the above, wherein the one or more mutations is selected from a silencing mutation, a knockdown mutation, a knockout mutation, a loss of function mutation, a downregulation mutation, an upregulation mutation or any combination thereof.

[0025] It is a further object of the present invention to disclose the modified Soybean plant, plant part, or plant cell as defined in any of the above, wherein the one or more mutations is in the coding region of said gene, a mutation in the regulatory region of said gene, or an epigenetic factor.

[0026] It is a further object of the present invention to disclose the modified Soybean plant, plant part, or plant cell as defined in any of the above, wherein said plant, plant part, or plant cell is homozygous for said at least one mutated gene.

[0027] It is a further object of the present invention to disclose the modified Soybean plant, plant part, or plant cell as defined in any of the above, wherein said plant, plant part, or plant cell is heterozygous for said at least one mutated gene.

[0028] It is a further object of the present invention to disclose the modified Soybean plant, plant part, or plant cell as defined in any of the above, wherein the one or more mutations is generated in planta via introduction of (a) Cas DNA and guide RNA (gRNA) sequence complementary to SEQ ID NO: 1, 220, 454, 674, 1014, 1305, 1491, 1798, 2090, 2200, 2296, 2630, 2810, 2973 and 3043, or (b) a ribonucleoprotein (RNP) complex comprising Cas protein and gRNA sequence complementary to SEQ ID NO: 1, 220, 454, 674, 1014, 1305, 1491, 1798, 2090, 2200, 2296, 2630, 2810, 2973 and 3043.

[0029] It is a further object of the present invention to disclose the modified Soybean plant, plant part, or plant cell as defined in any of the above, wherein said one or more mutations is generated in planta in said at least one Glyma.01G239600, Glyma.01G228700, Glyma.10G010500.1, Glyma.11G010500, Glyma.13G173500, Glyma.14G005700, Glyma.17G064400, Glyma.16G149300, Glyma.17G036400, Glyma.17G036300, Glyma.19g135000, Glyma.11g011500, Glyma.02g005600, Glyma.17g030400 and Glyma19g030500 genes via introduction of (a) Cas DNA and guide RNA (gRNA) sequence selected from the group consisting of a sequence comprising at least 85% sequence identity to at least one of SEQ ID NO: 4-219, SEQ ID NO: 223-453, SEQ ID NO: 457-673, SEQ ID NO: 677-1013, SEQ ID NO: 1017-1304, SEQ ID NO: 1308-1490, SEQ ID NO: 1494-1797, SEQ ID NO: 1801-2089, SEQ ID NO: 2093-2199, SEQ ID NO: 2203-2295, SEQ ID NO: 2299-2629, SEQ ID NO: 2633-2809, SEQ ID NO: 2813-2972, SEQ ID NO: 2976-3042 or SEQ ID NO: 3046-3268, respectively, and any combination thereof, or (b) a ribonucleoprotein (RNP) complex comprising Cas protein and gRNA sequence selected from the group consisting of a sequence comprising at least 85% sequence identity to at least one of SEQ ID NO: 4-219, SEQ ID NO: 223-453, SEQ ID NO: 457-673, SEQ ID NO: 677-1013, SEQ ID NO: 1017-1304, SEQ ID NO: 1308-1490, SEQ ID NO: 1494-1797, SEQ ID NO: 1801-2089, SEQ ID NO: 2093-2199, SEQ ID NO: 2203-2295, SEQ ID NO: 2299-2629, SEQ ID NO: 2633-2809, SEQ ID NO: 2813-2972, SEQ ID NO: 2976-3042 or SEQ ID NO: 3046-3268, respectively, and any combination thereof.

[0030] It is a further object of the present invention to disclose the modified Soybean plant, plant part, or plant cell as defined in any of the above, wherein said gRNA sequence comprises a 3′ Protospacer Adjacent Motif (PAM) selected from NGG, NNGRRT, NNNNGATT, NNAGAAW and NAAAAC.

[0031] It is a further object of the present invention to disclose the modified Soybean plant, plant part, or plant cell as defined in any of the above, wherein the plant, plant part, or plant cell does not comprise a transgene.

[0032] According to a further embodiment of the present invention, the modified Soybean plant, plant part, or plant cell as defined in any of the above, wherein the plant part is a seed, tissue culture of regenerable cells, protoplasts, callus or pollen.

[0033] It is a further object of the present invention to disclose the modified Soybean plant, plant part, or plant cell as defined in any of the above, wherein the plant, plant part, or plant cell has a content of phytoestrogen that is reduced by about 10%, about 20%, about 30%, about 50%, about 60%, about 70%, about 80%, or about 90% compared to the content of phytoestrogen in a Soybean plant, plant part, or plant cell absent of said one or more mutations.

[0034] It is a further object of the present invention to disclose the modified Soybean plant, plant part, or plant cell as defined in any of the above, wherein the phytoestrogen is selected from isoflavone and/or Coumestrol.

[0035] It is a further object of the present invention to disclose the modified Soybean plant, plant part, or plant cell as defined in any of the above, wherein the plant, plant part, or plant cell has a protein content that is elevated by about 10%, about 20%, about 30%, about 50%, about 60%, about 70%, about 80%, or about 90% compared to the protein content in a Soybean plant, plant part, or plant cell absent of said one or more mutations.

[0036] It is a further object of the present invention to disclose Soybean seed, pollen, plant parts or progeny of the modified Soybean plant as defined in any of the above, wherein said seed, pollen, plant parts or progeny comprises said one or more gene editing derived mutations in at least one gene selected from Glyma.01G239600, Glyma.01G228700, Glyma.10G010500.1, Glyma.11G010500, Glyma.13G173500, Glyma.14G005700, Glyma.17G064400, Glyma.16G149300, Glyma.17G036400, Glyma.17G036300, Glyma.19g135000, Glyma.11 g011500, Glyma.02g005600, Glyma.17g030400 and Glyma19g030500.

[0037] It is a further object of the present invention to disclose food and non-food products incorporating the modified Soybean plant, plant part or plant cell as defined in any of the above.

[0038] It is a further object of the present invention to disclose food and non-food products incorporating a seed of a Soybean plant as defined in any of the above.

[0039] It is a further object of the present invention to disclose a method for producing a modified Soybean plant, plant part, or plant cell exhibiting reduced phytoestrogen content and/or increased protein content using targeted genome modification, comprising steps of: (a) identifying a gene involved in phytoestrogen synthesis and/or increased protein content of a Soybean plant species; (b) synthesizing or designing a gRNA expression cassette corresponding to a target editing region along the Soybean genome, within the identified gene locus; (c) transforming said Soybean plant, plant part, or plant cell with CRISPR/Cas9 system; (d) screening the genome of said transformed plant, plant part, or plant cell for induced targeted mutation, e.g. loss of function mutation in the identified gene involved in phytoestrogen synthesis and/or increased protein content; (e) selecting said Soybean plant, plant part, or plant cell expressing desired one or more mutations in the editing target region, said mutations confer reduced phytoestrogen content and/or increased protein content; and (f) optionally, regenerating a plant from said transformed plant, plant part, or plant cell plant cell nucleus, or plant tissue and optionally screening said regenerated plants for a Soybean plant, with decreased phytoestrogen content and/or increased protein content.

[0040] It is a further object of the present invention to disclose the method as defined in any of the above, wherein the gRNA and its corresponding PAM is complementary to a sequence of a gene selected from a group comprising at least one of Glyma.01G239600, Glyma.01G228700, Glyma.10G010500.1, Glyma.11 G010500, Glyma.13G173500, Glyma.14G005700, Glyma.17G064400, Glyma.16G149300, Glyma.17G036400, Glyma.17G036300, Glyma.19g135000, Glyma.11 g011500, Glyma.02g005600, Glyma.17g030400 and Glyma19g030500.

[0041] It is a further object of the present invention to disclose a method for producing a modified Soybean plant, plant part, or plant cell exhibiting reduced phytoestrogen content and/or increased protein content using targeted genome modification comprising introducing into the genome of the plant, plant part, or plant cell one or more mutations in at least one gene selected from Glyma.01G239600, Glyma.01G228700, Glyma.10G010500.1, Glyma.11G010500, Glyma.13G173500, Glyma.14G005700, Glyma.17G064400, Glyma.16G149300, Glyma.17G036400, Glyma.17G036300, Glyma.19g135000, Glyma.11g011500, Glyma.02g005600, Glyma.17g030400 and Glyma19g030500.

[0042] It is a further object of the present invention to disclose the method as defined in any of the above, wherein the plant, plant part, or plant cell is characterized by reduced phytoestrogen content and/or increased protein content, as compared to a Soybean plant absent of said one or more mutations.

[0043] It is a further object of the present invention to disclose the method as defined in any of the above, wherein the plant, plant part, or plant cell is characterized by modulated or altered expression of said at least one gene as compared to a Soybean plant absent of said one or more mutations.

[0044] It is a further object of the present invention to disclose the method as defined in any of the above, wherein the plant, plant part, or plant cell is characterized by reduced expression of said at least one gene as compared to a Soybean plant absent of said one or more mutations.

[0045] It is a further object of the present invention to disclose the method as defined in any of the above, wherein the plant, plant part, or plant cell comprises one or more gene editing derived mutations in at least one gene selected from Glyma.01G239600, Glyma.01G228700, Glyma.10G010500.1, Glyma.11G010500, Glyma.13G173500, Glyma.14G005700, Glyma.17G064400, Glyma.16G149300, Glyma.11g011500, Glyma.02g005600, Glyma.17g030400 and Glyma19g030500 conferring reduced phytoestrogen content to said plant, plant part, or plant cell.

[0046] It is a further object of the present invention to disclose the method as defined in any of the above, wherein the plant, plant part, or plant cell comprises one or more gene editing derived mutations in at least one gene selected from Glyma.17G036400, Glyma.17G036300 and Glyma.19g135000 conferring increased protein content in the Soybean plant, plant part, or plant cell.

[0047] It is a further object of the present invention to disclose the method as defined in any of the above, wherein the Glyma.01G239600, Glyma.01G228700, Glyma.10G010500.1, Glyma.11G010500, Glyma.13G173500, Glyma.14G005700, Glyma.17G064400, Glyma.16G149300, Glyma.17G036400, Glyma.17G036300, Glyma.19g135000, Glyma.11g011500, Glyma.02g005600, Glyma.17g030400 and Glyma19g030500 genes comprise a genomic sequence as set forth in SEQ ID NO: 1, 220, 454, 674, 1014, 1305, 1491, 1798, 2090, 2200, 2296, 2630, 2810, 2973 and 3043, respectively, or a functional variant thereof.

[0048] It is a further object of the present invention to disclose the method as defined in any of the above, wherein the functional variant has at least 80% sequence identity to said SEQ ID NO: 1, 220, 454, 674, 1014, 1305, 1491, 1798, 2090, 2200, 2296, 2630, 2810, 2973 and 3043.

[0049] It is a further object of the present invention to disclose the method as defined in any of the above, wherein the sequence of a target editing region within the at least one gene is selected from the group comprising a) a nucleic acid sequence encoding the polypeptide comprising a sequence selected from the group comprising SEQ ID NO: 3, 222, 456, 676, 1016, 1307, 1493, 1800, 2092, 2202, 2298, 2632, 2812, 2975 and 3045, b) a nucleic acid sequence comprising a sequence selected from the group comprising SEQ ID NO: 1, 220, 454, 674, 1014, 1305, 1491, 1798, 2090, 2200, 2296, 2630, 2810, 2973 and 3043, and c) a nucleic acid sequence having at least 80% sequence identity to at least 200 contiguous nucleotides of a nucleic acid sequence selected from the group comprising SEQ ID NO: 1, 220, 454, 674, 1014, 1305, 1491, 1798, 2090, 2200, 2296, 2630, 2810, 2973 and 3043.

[0050] It is a further object of the present invention to disclose the method as defined in any of the above, wherein the one or more mutations is introduced in planta using targeted genome modification.

[0051] It is a further object of the present invention to disclose the method as defined in any of the above, wherein the one or more mutations is introduced using CRISPR (Clustered Regularly Interspaced Short Palindromic Repeats) and CRISPR-associated (Cas) gene (CRISPR/Cas), Transcription activator-like effector nuclease (TALEN), Zinc Finger Nuclease (ZFN), meganuclease or any combination thereof.

[0052] It is a further object of the present invention to disclose the method as defined in any of the above, wherein said Cas gene is selected from the group consisting of Cas3, Cas4, Cas5, Cas5e (or CasD), Cas6, Cas6e, Cas6f, Cas7, Cas8a1, Cas8a2, Cas8b, Cas8c, Cas9, Cas10, Cast10d, Cas12, Cas13, Cas14, CasX, CasY, CasF, CasG, CasH, Csy1, Csy2, Csy3, Cse1 (or CasA), Cse2 (or CasB), Cse3 (or CasE), Cse4 (or CasC), Csc1, Csc2, Csa5, Csn1, Csn2, Csm2, Csm3, Csm4, Csm5, Csm6, Cmr1, Cmr3, Cmr4, Cmr5, Cmr6, Cpf1, Csb1, Csb2, Csb3, Csx17, Csx14, Csx10, Csx16, CsaX, Csx3, Csz1, Csx15, Csf1, Csf2, Csf3, Csf4, and Cu1966 and any combination thereof.

[0053] It is a further object of the present invention to disclose the method as defined in any of the above, wherein the at least one mutated gene is a CRISPR/Cas9-induced heritable mutated allele.

[0054] It is a further object of the present invention to disclose the method as defined in any of the above, wherein the one or more mutations is selected from a silencing mutation, a knockdown mutation, a knockout mutation, a loss of function mutation, a downregulation mutation, an upregulation mutation or any combination thereof.

[0055] It is a further object of the present invention to disclose the method as defined in any of the above, wherein the one or more mutations is in the coding region of said gene, a mutation in the regulatory region of said gene, or an epigenetic factor.

[0056] It is a further object of the present invention to disclose the method as defined in any of the above, wherein said plant, plant part, or plant cell is homozygous for said at least one mutated gene.

[0057] It is a further object of the present invention to disclose the method as defined in any of the above, wherein said plant, plant part, or plant cell is heterozygous for said at least one mutated gene.

[0058] It is a further object of the present invention to disclose the method as defined in any of the above, wherein the one or more mutations is generated in planta via introduction of (a) Cas DNA and guide RNA (gRNA) sequence complementary to SEQ ID NO: 1, 220, 454, 674, 1014, 1305, 1491, 1798, 2090, 2200, 2296, 2630, 2810, 2973 and 3043, or (b) a ribonucleoprotein (RNP) complex comprising Cas protein and gRNA sequence complementary to SEQ ID NO: 1, 220, 454, 674, 1014, 1305, 1491, 1798, 2090, 2200, 2296, 2630, 2810, 2973 and 3043.

[0059] It is a further object of the present invention to disclose the method as defined in any of the above, wherein said one or more mutations is generated in planta in said at least one Glyma.01G239600, Glyma.01G228700, Glyma.10G010500.1, Glyma.11G010500, Glyma.13G173500, Glyma.14G005700, Glyma.17G064400, Glyma.16G149300, Glyma.17G036400, Glyma.17G036300, Glyma.19g135000, Glyma.11g011500, Glyma.02g005600, Glyma.17g030400 and Glyma19g030500 genes via introduction of (a) Cas DNA and guide RNA (gRNA) sequence selected from the group consisting of a sequence comprising at least 85% sequence identity to at least one of SEQ ID NO: 4-219, SEQ ID NO: 223-453, SEQ ID NO: 457-673, SEQ ID NO: 677-1013, SEQ ID NO: 1017-1304, SEQ ID NO: 1308-1490, SEQ ID NO: 1494-1797, SEQ ID NO: 1801-2089, SEQ ID NO: 2093-2199, SEQ ID NO: 2203-2295, SEQ ID NO: 2299-2629, SEQ ID NO: 2633-2809, SEQ ID NO: 2813-2972, SEQ ID NO: 2976-3042 or SEQ ID NO: 3046-3268, respectively, or (b) a ribonucleoprotein (RNP) complex comprising Cas protein and gRNA sequence selected from the group consisting of a sequence comprising at least 85% sequence identity to at least one of SEQ ID NO: 4-219, SEQ ID NO: 223-453, SEQ ID NO: 457-673, SEQ ID NO: 677-1013, SEQ ID NO: 1017-1304, SEQ ID NO: 1308-1490, SEQ ID NO: 1494-1797, SEQ ID NO: 1801-2089, SEQ ID NO: 2093-2199, SEQ ID NO: 2203-2295, SEQ ID NO: 2299-2629, SEQ ID NO: 2633-2809, SEQ ID NO: 2813-2972, SEQ ID NO: 2976-3042 or SEQ ID NO: 3046-3268, respectively.

[0060] It is a further object of the present invention to disclose the method as defined in any of the above, wherein said gRNA sequence comprises a 3′ Protospacer Adjacent Motif (PAM) selected from NGG, NNGRRT, NNNNGATT, NNAGAAW and NAAAAC.

[0061] It is a further object of the present invention to disclose the method as defined in any of the above, wherein the transformation is carried out to deliver an expression cassette comprising a) a selection marker, b) a nucleotide sequence encoding one or more gRNA molecules comprising a sequence selected from the group consisting of a sequence comprising at least 85% sequence identity to at least one of SEQ ID NO: 4-219, SEQ ID NO: 223-453, SEQ ID NO: 457-673, SEQ ID NO: 677-1013, SEQ ID NO: 1017-1304, SEQ ID NO: 1308-1490, SEQ ID NO: 1494-1797, SEQ ID NO: 1801-2089, SEQ ID NO: 2093-2199, SEQ ID NO: 2203-2295, SEQ ID NO: 2299-2629, SEQ ID NO: 2633-2809, SEQ ID NO: 2813-2972, SEQ ID NO: 2976-3042 or SEQ ID NO: 3046-3268, and c) a nucleotide sequence encoding a Cas molecule.

[0062] It is a further object of the present invention to disclose the method as defined in any of the above, wherein the method comprises administering to the Soybean plant, plant part, or plant cell a nucleic acid composition comprising: a) a first nucleotide sequence encoding a gRNA molecule, and b) a second nucleotide sequence encoding the Cas molecule.

[0063] It is a further object of the present invention to disclose the method as defined in any of the above, wherein the CRISPR/Cas system is delivered to the cell by a plant virus.

[0064] It is a further object of the present invention to disclose the method as defined in any of the above, wherein the method comprises steps of (a) introducing into a Soybean plant or plant part or cell thereof (i) at least one RNA-guided endonuclease comprising at least one nuclear localization signal or nucleic acid encoding at least one RNA-guided endonuclease comprising at least one nuclear localization signal, (ii) at least one guide RNA (gRNA) or DNA encoding at least one gRNA, and, optionally, (iii) at least one donor polynucleotide; and (b) culturing the Soybean plant or plant part or cell thereof such that each gRNA directs an RNA-guided endonuclease to a target site in the chromosomal sequence where the RNA-guided endonuclease introduces a double-stranded break in the target site, and the double-stranded break is repaired by a DNA repair process such that the chromosomal sequence is modified, wherein the target site is located in at least one gene selected from Glyma.01G239600, Glyma.01G228700, Glyma.10G010500.1, Glyma.11G010500, Glyma.13G173500, Glyma.14G005700, Glyma.17G064400, Glyma.16G149300, Glyma.17G036400, Glyma.17G036300, Glyma.19g135000, Glyma.11g011500, Glyma.02g005600, Glyma.17g030400 and Glyma19g030500 and the chromosomal modification interrupts or interferes with transcription and/or translation of the at least one gene.

[0065] It is a further object of the present invention to disclose the method as defined in any of the above, wherein the RNA-guided endonuclease is derived from a clustered regularly interspersed short palindromic repeats (CRISPR)/CRISPR-associated (Cas) system.

[0066] It is a further object of the present invention to disclose the method as defined in any of the above, wherein introduction of a genome modification does not insert exogenous genetic material, and produces a non-naturally occurring or modified Soybean plant, plant part or cell thereof.

[0067] It is a further object of the present invention to disclose the method as defined in any of the above, further comprises steps of (a) identifying at least one locus within a DNA sequence of a Soybean plant or a cell thereof selected from Glyma.01G239600, Glyma.01G228700, Glyma.10G010500.1, Glyma.11G010500, Glyma.13G173500, Glyma.14G005700, Glyma.17G064400, Glyma.16G149300, Glyma.17G036400, Glyma.17G036300, Glyma.19g135000, Glyma.11g011500, Glyma.02g005600, Glyma.17g030400 and Glyma19g030500 genes; (b) identifying at least one custom endonuclease recognition sequence within the at least one locus of the gene; and (c) identifying the Soybean plant, a cell thereof, or a progeny cell thereof as comprising a modification in the loci of the at least one gene, said modification confers modulated or altered expression, e.g. silencing, of at least one gene selected from Glyma.01G239600, Glyma.01G228700, Glyma.10G010500.1, Glyma.11G010500, Glyma.13G173500, Glyma.14G005700, Glyma.17G064400, Glyma.16G149300, Glyma.17G036400, Glyma.17G036300, Glyma.19g135000, Glyma.11g011500, Glyma.02g005600, Glyma.17g030400 and Glyma19g030500.

[0068] It is a further object of the present invention to disclose the method as defined in any of the above, wherein the plant, plant part, or plant cell does not comprise a transgene.

[0069] It is a further object of the present invention to disclose the method as defined in any of the above, wherein the plant part is a seed, tissue culture of regenerable cells, protoplasts, callus or pollen.

[0070] It is a further object of the present invention to disclose the method as defined in any of the above, wherein the plant, plant part, or plant cell has a content of phytoestrogen that is reduced by about 10%, about 20%, about 30%, about 50%, about 60%, about 70%, about 80%, or about 90% compared to the content of phytoestrogen in a Soybean plant, plant part, or plant cell absent of said one or more mutations.

[0071] It is a further object of the present invention to disclose the method as defined in any of the above, wherein the phytoestrogen is selected from isoflavone and/or Coumestrol.

[0072] It is a further object of the present invention to disclose the method as defined in any of the above, wherein the plant, plant part, or plant cell has a protein content that is elevated by about 10%, about 20%, about 30%, about 50%, about 60%, about 70%, about 80%, or about 90% compared to the protein content in a Soybean plant, plant part, or plant cell absent of said one or more mutations.

[0073] It is a further object of the present invention to disclose the method as defined in any of the above, wherein the method further comprises steps of analyzing the Soybean plants or progeny thereof, plant part, or plant cell by a) isolating genomic DNA from the mutated plant material or its progeny; and b) amplifying segments of a gene involved in phytoestrogen synthesis and/or a gene associated with protein accumulation such as fatty acid transport or sugar metabolism, in the isolated genomic DNA, using primers specific to at least one of Glyma.01G239600, Glyma.01G228700, Glyma.10G010500.1, Glyma.11G010500, Glyma.13G173500, Glyma.14G005700, Glyma.17G064400, Glyma.16G149300, Glyma.17G036400, Glyma.17G036300, Glyma.19g135000, Glyma.11g011500, Glyma.02g005600, Glyma.17g030400 and Glyma19g030500 genes or to the DNA sequences adjacent to the at least one gene.

[0074] It is a further object of the present invention to disclose a modified Soybean seed, pollen, plant parts or progeny with reduced phytoestrogen content and/or increased protein content, produced by the method as defined in any of the above, wherein said seed, pollen, plant parts or progeny comprises said one or more gene editing derived mutations in at least one gene selected from Glyma.01G239600, Glyma.01G228700, Glyma.10G010500.1, Glyma.11G010500, Glyma.13G173500, Glyma.14G005700, Glyma.17G064400, Glyma.16G149300, Glyma.17G036400, Glyma.17G036300, Glyma.19g135000, Glyma.11g011500, Glyma.02g005600, Glyma.17g030400 and Glyma19g030500.

[0075] It is a further object of the present invention to disclose a method for reducing phytoestrogen content and/or increasing protein content in a Soybean plant, plant part or plant cell, using targeted genome modification, comprising introducing into the genome of the plant, plant part, or plant cell one or more mutations in at least one gene selected from Glyma.01G239600, Glyma.01G228700, Glyma.10G010500.1, Glyma.11G010500, Glyma.13G173500, Glyma.14G005700, Glyma.17G064400, Glyma.16G149300, Glyma.17G036400, Glyma.17G036300, Glyma.19g135000, Glyma.11g011500, Glyma.02g005600, Glyma.17g030400 and Glyma19g030500.

[0076] It is a further object of the present invention to disclose a method for increasing Soybean yield using targeted genome modification, comprising introducing into the genome of the Soybean plant, plant part, or plant cell one or more mutations in at least one gene selected from Glyma.01G239600, Glyma.01G228700, Glyma.10G010500.1, Glyma.11G010500, Glyma.13G173500, Glyma.14G005700, Glyma.17G064400, Glyma.16G149300, Glyma.17G036400, Glyma.17G036300, Glyma.19g135000, Glyma.11g011500, Glyma.02g005600, Glyma.17g030400 and Glyma19g030500.

[0077] It is a further object of the present invention to disclose the method as defined in any of the above, wherein the plant part is selected from the group consisting of seeds, pollen, plant cells, or plant tissue.

[0078] It is a further object of the present invention to disclose the method as defined in any of the above, wherein the plant, plant part, or plant cell comprises one or more gene editing derived mutations in at least one gene selected from Glyma.01G239600, Glyma.01G228700, Glyma.10G010500.1, Glyma.11G010500, Glyma.13G173500, Glyma.14G005700, Glyma.17G064400, Glyma.16G149300, Glyma.11g011500, Glyma.02g005600, Glyma.17g030400 and Glyma19g030500 conferring reduced phytoestrogen content to said plant, plant part, or plant cell.

[0079] It is a further object of the present invention to disclose the method as defined in any of the above, wherein the plant, plant part, or plant cell comprises one or more gene editing derived mutations in at least one gene selected from Glyma.17G036400, Glyma.17G036300 and Glyma.19g135000 conferring increased protein content in the Soybean plant, plant part, or plant cell.

[0080] It is a further object of the present invention to disclose the method as defined in any of the above, wherein the Glyma.01G239600, Glyma.01G228700, Glyma.10G010500.1, Glyma.11G010500, Glyma.13G173500, Glyma.14G005700, Glyma.17G064400, Glyma.16G149300, Glyma.17G036400, Glyma.17G036300, Glyma.19g135000, Glyma.11g011500, Glyma.02g005600, Glyma.17g030400 and Glyma19g030500 genes comprise a genomic sequence as set forth in SEQ ID NO: 1, 220, 454, 674, 1014, 1305, 1491, 1798, 2090, 2200, 2296, 2630, 2810, 2973 and 3043, respectively, or a functional variant thereof.

[0081] It is a further object of the present invention to disclose the method as defined in any of the above, wherein the functional variant has at least 80% sequence identity to said SEQ ID NO: 1, 220, 454, 674, 1014, 1305, 1491, 1798, 2090, 2200, 2296, 2630, 2810, 2973 and 3043.

[0082] It is a further object of the present invention to disclose the method as defined in any of the above, wherein said one or more mutations is generated in planta in said at least one Glyma.01G239600, Glyma.01G228700, Glyma.10G010500.1, Glyma.11 G010500, Glyma.13G173500, Glyma.14G005700, Glyma.17G064400, Glyma.16G149300, Glyma.17G036400, Glyma.17G036300, Glyma.19g135000, Glyma.11g011500, Glyma.02g005600, Glyma.17g030400 and Glyma19g030500 genes via introduction of (a) Cas DNA and guide RNA (gRNA) sequence selected from the group consisting of a sequence comprising at least 85% sequence identity to at least one of SEQ ID NO: 4-219, SEQ ID NO: 223-453, SEQ ID NO: 457-673, SEQ ID NO: 677-1013, SEQ ID NO: 1017-1304, SEQ ID NO: 1308-1490, SEQ ID NO: 1494-1797, SEQ ID NO: 1801-2089, SEQ ID NO: 2093-2199, SEQ ID NO: 2203-2295, SEQ ID NO: 2299-2629, SEQ ID NO: 2633-2809, SEQ ID NO: 2813-2972, SEQ ID NO: 2976-3042 or SEQ ID NO: 3046-3268, respectively, or (b) a ribonucleoprotein (RNP) complex comprising Cas protein and gRNA sequence selected from the group consisting of a sequence comprising at least 85% sequence identity to at least one of SEQ ID NO: 4-219, SEQ ID NO: 223-453, SEQ ID NO: 457-673, SEQ ID NO: 677-1013, SEQ ID NO: 1017-1304, SEQ ID NO: 1308-1490, SEQ ID NO: 1494-1797, SEQ ID NO: 1801-2089, SEQ ID NO: 2093-2199, SEQ ID NO: 2203-2295, SEQ ID NO: 2299-2629, SEQ ID NO: 2633-2809, SEQ ID NO: 2813-2972, SEQ ID NO: 2976-3042 or SEQ ID NO: 3046-3268, respectively.

[0083] It is a further object of the present invention to disclose a construct comprising or encoding (a) a nucleotide sequence encoding a Cas molecule and one or more gRNA molecules comprising a sequence selected from the group consisting of a sequence comprising at least 85% sequence identity to at least one of SEQ ID NO: 4-219, SEQ ID NO: 223-453, SEQ ID NO: 457-673, SEQ ID NO: 677-1013, SEQ ID NO: 1017-1304, SEQ ID NO: 1308-1490, SEQ ID NO: 1494-1797, SEQ ID NO: 1801-2089, SEQ ID NO: 2093-2199, SEQ ID NO: 2203-2295, SEQ ID NO: 2299-2629, SEQ ID NO: 2633-2809, SEQ ID NO: 2813-2972, SEQ ID NO: 2976-3042, SEQ ID NO: 3046-3268, and any combination thereof, or (b) a ribonucleoprotein (RNP) complex comprising Cas protein and one or more gRNA molecules comprising a sequence comprising at least 85% sequence identity to at least one of SEQ ID NO: 4-219, SEQ ID NO: 223-453, SEQ ID NO: 457-673, SEQ ID NO: 677-1013, SEQ ID NO: 1017-1304, SEQ ID NO: 1308-1490, SEQ ID NO: 1494-1797, SEQ ID NO: 1801-2089, SEQ ID NO: 2093-2199, SEQ ID NO: 2203-2295, SEQ ID NO: 2299-2629, SEQ ID NO: 2633-2809, SEQ ID NO: 2813-2972, SEQ ID NO: 2976-3042 or SEQ ID NO: 3046-3268, and any combination thereof.

[0084] It is a further object of the present invention to disclose a method of modifying the phytoestrogen content and/or protein content of a Soybean plant, plant part, or plant cell, comprising introducing into a Soybean plant, plant part, or plant cell the construct as defined above.

[0085] It is a further object of the present invention to disclose an isolated polynucleotide sequence comprising at least 80% sequence identity to a polynucleotide sequence selected from the group consisting of SEQ ID NO: 1, 2, 220, 221, 454, 455, 674, 675, 1014, 1015, 1305, 1306, 1491, 1492, 1798, 1799, 2090, 2091, 2200, 2201, 2296, 2297, 2630, 2631, 2810, 2811, 2973, 2974, 3043 and 3044.

[0086] It is a further object of the present invention to disclose an isolated polypeptide sequence comprising at least 80% sequence identity to SEQ ID NO: 3, 222, 456, 676, 1016, 1307, 1493, 1800, 2092, 2202, 2298, 2632, 2812, 2975 and 3045.

[0087] It is a further object of the present invention to disclose a use of a nucleic acid sequence comprising at least 80% sequence identity to a sequence as set forth in at least one of SEQ ID NO: 4-219, SEQ ID NO: 223-453, SEQ ID NO: 457-673, SEQ ID NO: 677-1013, SEQ ID NO: 1017-1304, SEQ ID NO: 1308-1490, SEQ ID NO: 1494-1797, SEQ ID NO: 1801-2089, SEQ ID NO: 2633-2809, SEQ ID NO: 2813-2972, SEQ ID NO: 2976-3042 or SEQ ID NO: 3046-3268 and any combination thereof for targeted gene editing of at least one Soybean gene selected from Glyma.01G239600, Glyma.01G228700, Glyma.10G010500.1, Glyma.11G010500, Glyma.13G173500, Glyma.14G005700, Glyma.17G064400, Glyma.16G149300, Glyma.11g011500, Glyma.02g005600, Glyma.17g030400 and Glyma19g030500, respectively, said gene editing confers reduced phytoestrogen content in a Soybean plant, plant part or plant cell.

[0088] It is a further object of the present invention to disclose a use of a nucleic acid sequence comprising at least 80% sequence identity to a sequence as set forth in at least one of SEQ ID NO: 2093-2199, SEQ ID NO: 2203-2295, SEQ ID NO: 2299-2629 and any combination thereof, for targeted gene editing of at least one Soybean gene selected from Glyma.17G036400, Glyma.17G036300, Glyma.19g135000, respectively, said gene editing confers increased protein content in a Soybean plant, plant part or plant cell.

### DETAILED DESCRIPTION OF THE PREFERRED EMBODIMENTS

[0089] In the following detailed description of the preferred embodiments, reference is made to the accompanying drawings that form a part hereof, and in which are shown by way of illustration specific embodiments in which the invention may be practiced. It is understood that other embodiments may be utilized and structural changes may be made without departing from the scope of the present invention. The present invention may be practiced according to the claims without some or all of these specific details. For the purpose of clarity, technical material that is known in the technical fields related to the invention has not been described in detail so that the present invention is not unnecessarily obscured.

[0090] The present disclosure relates to conferring desirable traits in Soybean plants. More particularly, the current invention pertains to producing Soybean plants with improved protein content and containing less xenoestrogen, by manipulating genes controlling fatty acid transport and/or sugar metabolism, and phenolic compounds, respectively.

[0091] The term “Xenoestrogen” as used herein refers to a type of xenohormone that imitates estrogen. Xenoestrogen can be either synthetic or natural chemical compound. Synthetic xenoestrogens include some widely used industrial compounds, such as PCBs, BPA, and phthalates, which have estrogenic effects on a living organism even though they differ chemically from the estrogenic substances produced internally by the endocrine system of any organism. Natural xenoestrogens include phytoestrogens which are plant-derived xenoestrogens. Because the primary route of exposure to these compounds is by consumption of phytoestrogenic plants, they are also called “dietary estrogens”. Mycoestrogens, estrogenic substances from fungi, are another type of xenoestrogen that are also considered mycotoxins.

[0092] Xenoestrogens are clinically significant because they can mimic the effects of endogenous estrogen and thus have been implicated in disorders of the reproductive system.

[0093] A phytoestrogen is a plant-derived xenoestrogen not generated within the endocrine system, but consumed by eating phytoestrogenic plants. It is a diverse group of naturally occurring nonsteroidal plant compounds that, because of its structural similarity with estradiol (1743-estradiol), have the ability to cause estrogenic and/or antiestrogenic effects.

[0094] The similarities, at molecular level, of an estrogen and a phytoestrogen allow them to mildly mimic and sometimes act as an antagonist of estrogen.

[0095] It is also within the scope of the current invention that phytoestrogens are naturally occurring, polyphenolic, non-steroidal plant compounds that are structurally similar to 170-estradiol and have estrogenic and/or antiestrogenic effects. These effects are mediated by binding to estrogen receptors, by alterations in the concentrations of endogenous estrogens, and by binding to or stimulation of the synthesis of sex hormone binding globulin.

[0096] There are four main groups of phytoestrogens: isoflavonoids, flavonoids, stilbenes, and lignans. Of these, the most commonly occurring are the flavonoids (of which the coumestans, prenylated flavonoids, and isoflavones have the greatest estrogenic effects) and the lignans. The isoflavonoids include genistein, daidzein, coumestrol, and equol; the prenylated flavonoids include 8-prenylnaringenin, the stilbenes include resveratrol, and the lignans include enterodiol and enterolactone. Mycoestrogens (mycotoxins) are metabolites of Fusarium, a fungus that is often found in pastures and in alfalfa and clover.

[0097] It is herein acknowledged that a wide range of plants and the products derived from them, such as soya milk and tofu, contain estrogens (isoflavones or lignans) with some chemical affinity for estradiol; the concentrations of isoflavone are particularly high in the Soybean plant.

[0098] According to further aspects of the present invention, isoflavones are a class of flavonoids, and the main isoflavones of soybeans are daidzin, genistin, and glycitin.

[0099] The terms “Soybean” or “Soya” or “Soy” or “Soya bean” or Soy bean” refers to the plant species Glycine max of the genus Glycine (family Fabaceae), which is a species of legume native to East Asia. Traditional unfermented food uses of Soybeans include soy milk, from which tofu and tofu skin are made. Fermented soy foods include soy sauce, fermented bean paste, natto, and tempeh. Fat-free (defatted) soybean meal is a significant and cheap source of protein for animal feeds and many packaged meals. For example, Soybean products, such as textured vegetable protein (TVP), are ingredients in many meat and dairy substitutes.

[0100] As used herein, the term “phytoestrogen synthesis gene” or “phytoestrogen biosynthesis gene” refers to any gene involved in isoflavone/coumestrol (CM)/phytoestrogen biosynthesis in Soybean. In the context of the present invention it refers to a gene selected from Glyma.01G239600, Glyma.01G228700, Glyma.10G010500.1, Glyma.11G010500, Glyma.13G173500, Glyma.14G005700, Glyma.17G064400, Glyma.16G149300, Glyma.11g011500, Glyma.02g005600, Glyma.17g030400 and Glyma19g030500, homologs, orthologs, paralogs and variants thereof.

[0101] As used herein, the term “protein content” or “protein accumulation” associated gene refers to any gene involved in or associated with protein accumulation or increasing protein content in Soybean. In the context of the present invention it refers to a gene selected from Glyma.17G036400, Glyma.17G036300 and Glyma.19g135000, homologs, orthologs, paralogs and variants thereof.

[0102] As used herein, the term “modified” or “non-naturally occurring” when used in reference to a Soybean plant means a Soybean plant that has been genetically modified by human, for example, by induction of a mutation in a gene or regulatory element of the gene by for example gene editing, such as by the CRISPR/Cas system targeted by specific guide RNA (gRNA) molecules. Furthermore, a plant generated by cross breeding different strains and varieties is also considered a “non-naturally occurring plant” because the selection and breeding is performed by human intervention. In contrast, a Soybean plant containing only spontaneous or naturally occurring mutations is not a “modified” or “non-naturally occurring Soybean plant” as defined herein. One skilled in the art understands that while a modified or non-naturally occurring Soybean plant typically has a nucleotide sequence that is altered as compared to a similar unmodified or naturally occurring Soybean plant, a modified or non-naturally occurring Soybean plant also can be genetically modified by human intervention without altering its nucleotide sequence, for example, by modifying its methylation pattern.

[0103] According to one embodiment, the present invention provides a modified Soybean plant, plant part, or plant cell exhibiting reduced phytoestrogen content and/or increased protein content, wherein the modified Soybean plant, plant part, or plant cell comprises one or more gene editing derived mutations in at least one gene selected from Glyma.01G239600, Glyma.01G228700, Glyma.10G010500.1, Glyma.11G010500, Glyma.13 G173500, Glyma.14G005700, Glyma.17G064400, Glyma.16G149300, Glyma.17G036400, Glyma.17G036300, Glyma.19g135000, Glyma.11g011500, Glyma.02g005600, Glyma.17g030400 and Glyma19g030500.

[0104] According to a further embodiment of the present invention, the plant, plant part, or plant cell is characterized by reduced phytoestrogen content and/or increased protein content, as compared to a Soybean plant absent of said one or more mutations.

[0105] According to a further embodiment of the present invention, the plant, plant part, or plant cell is characterized by modulated or altered expression of said at least one gene as compared to a Soybean plant absent of said one or more mutations.

[0106] According to a further embodiment of the present invention, the plant, plant part, or plant cell is characterized by reduced expression of said at least one gene as compared to a Soybean plant absent of said one or more mutations.

[0107] According to a further embodiment of the present invention, the plant, plant part, or plant cell comprises one or more gene editing derived mutations in at least one gene selected from Glyma.01G239600, Glyma.01G228700, Glyma.10G010500.1, Glyma.11G010500, Glyma.13G173500, Glyma.14G005700, Glyma.17G064400, Glyma.16G149300, Glyma.11g011500, Glyma.02g005600, Glyma.17g030400 and Glyma19g030500 conferring reduced phytoestrogen content to said plant, plant part, or plant cell.

[0108] According to a further embodiment of the present invention, the plant, plant part, or plant cell comprises one or more gene editing derived mutations in at least one gene selected from Glyma.17G036400, Glyma.17G036300 and Glyma.19g135000 conferring increased protein content in the Soybean plant, plant part, or plant cell.

[0109] The present invention further provides a method for producing a modified Soybean plant, plant part, or plant cell exhibiting reduced phytoestrogen content and/or increased protein content using targeted genome modification comprising steps of: (a) identifying a gene involved in phytoestrogen synthesis and/or increased protein content of a Soybean plant species; (b) synthesizing or designing a gRNA expression cassette corresponding to a target editing region along the Soybean genome, within the identified gene locus; (c) transforming said Soybean plant, plant part, or plant cell with CRISPR/Cas9 system; (d) screening the genome of said transformed plant, plant part, or plant cell for induced targeted mutation, e.g. loss of function mutation in the identified gene involved in phytoestrogen synthesis and/or increased protein content; (e) selecting said Soybean plant, plant part, or plant cell expressing desired one or more mutations in the editing target region, said mutations confer reduced phytoestrogen content and/or increased protein content; and (f) optionally, regenerating a plant from said transformed plant, plant part, or plant cell plant cell nucleus, or plant tissue and optionally screening said regenerated plants for a Soybean plant, with decreased phytoestrogen content and/or increased protein content.

[0110] It is further within the scope of the present invention that the gRNA and its corresponding PAM is complementary to a sequence of a gene selected from a group comprising at least one of Glyma.01G239600, Glyma.01G228700, Glyma.10G010500.1, Glyma.11 G010500, Glyma.13G173500, Glyma.14G005700, Glyma.17G064400, Glyma.16G149300, Glyma.17G036400, Glyma.17G036300, Glyma.19g135000, Glyma.11g011500, Glyma.02g005600, Glyma.17g030400 and Glyma19g030500.

[0111] According to a further embodiment, the present invention provides a method for producing a modified Soybean plant, plant part, or plant cell exhibiting reduced phytoestrogen content and/or increased protein content using targeted genome modification comprising introducing into the genome of the plant, plant part, or plant cell one or more mutations in at least one gene selected from Glyma.01G239600, Glyma.01 G228700, Glyma.10G010500.1, Glyma.11 G010500, Glyma.13G173500, Glyma.14G005700, Glyma.17G064400, Glyma.16G149300, Glyma.17G036400, Glyma.17G036300, Glyma.19g135000, Glyma.11g011500, Glyma.02g005600, Glyma.17g030400 and Glyma19g030500.

[0112] The method of the present invention is based on gene editing of the Soybean plant genome at specific nucleic acid sequences, which result in a set of desired traits such as decreased phytoestrogens (e.g. phytoestrogen free) and higher protein content or protein accumulation.

[0113] The challenge here is to efficiently induce precise and predictable targeted mutations pivotal to reducing phytoestrogen levels and or increasing protein content in the Soybean plant using the CRISPR/Cas9 system.

[0114] A significant added value of gene editing is that it does not qualify as transgene modification so the resultant transgene-free plant will not be considered a GMO plant/product in many significant territories. While the exact and operational definition of genetically modified is hotly debated and contested, it is generally agreed upon and accepted that genetic modification refers to plants and animals that have been altered in a way that wouldn't have arisen naturally through evolution. The clearest and most obvious example is a transgenic organism whose genome now incorporates a gene from another species, generating a novel trait to that organism, such as pest resistance. The situation is different with genome editing, as the CRISPR machinery is not necessarily integrated into the plant genome, it is used transiently to create the desired mutation and only the editing event is inherited to the next generation.

[0115] The present invention disclosed herein provides a method for producing a plant with decreased phytoestrogen compounds (e.g. isoflavones, Coumestrols) and/or higher content of protein when compared to a corresponding wild type, or non-edited Soybean plant. The present invention provides plant, plants cell, plant parts or their derivatives exhibiting decreased levels of phytoestrogen and higher protein content achieved by gene-editing and plants comprised of such cells, progeny, seed and pollen derived from such plants, and methods of making and methods of using such plant cell(s) or plant(s), progeny, seed(s), pollen or any other plant part thereof. Particularly, said improved trait(s) are manifested by reducing phytoestrogen levels and/or increasing seed protein content in the Soybean plant.

[0116] Gene Editing

[0117] Reference is now made to gene editing technique used in the present invention to produce Soybean plants with improved traits (e.g. reduced phytoestrogen levels and/or higher protein content).

[0118] Without wishing to be bound by theory, mutation breeding refers to a host of techniques designed to rapidly and effectively induce desired or remove unwanted traits via artificial mutations in a target organism. Gene editing is such a mutation breeding tool which offers significant advantages over traditional genetic modification.

[0119] Genetic transformation (i.e. traditional genetic modification) is a molecular technology involving inserting a DNA sequence of interest, coding for a desirable trait, into an organism's genome. Gene editing is a mutation breeding tool which allows precise, targeted modification of the genome. It achieves a result when a DNA nuclease (a protein complex from the Cas family) is precisely directed toward an exact genome locus using a guide RNA, and then cleaves the genome at that site.

[0120] One advantage of using the CRISPR/Cas system over traditional genetic modification is that the Cas protein family are easily programmed to make a DNA double strand break (DSB) at any desired loci. The initial cleavage is followed by repairing chromosomal DSBs. There are two major cellular repair pathways in that respect: Non-homologous end joining (NHEJ) and Homology directed repair (HDR).

[0121] In some aspects, this invention concerns NHEJ pathway which is active throughout the cell cycle and has a higher capacity for repair, as there is no requirement for a repair template (sister chromatid or homologue) or extensive DNA synthesis. NHEJ also finishes repair of most types of breaks in tens of minutes—an order of magnitude faster than HDR. NHEJ-mediated repair of DSBs is useful if the intent is to make a null allele (knockout) in a gene of interest, as it is prone to generating indel errors. Indel errors generated in the course of repair by NHEJ are typically small (1-10 bp) but extremely heterogeneous. There is consequently a relatively high chance of causing a frameshift mutation. Of some importance, the deletion can be less heterogeneous when constrained by sequence identities in flanking sequence (microhomologies).

[0122] Additionally, there is no foreign DNA left over in the plant after selection for plants which contain the desired editing event and do not carry the CRISPR/Cas machinery. This significant advantage has allowed gene editing to be viewed by many legal systems around the world as GMO-free.

[0123] Significant advances have been made recently in an attempt to more efficiently target and cleave genomic DNA by site specific nucleases [e.g. zinc finger nucleases (ZFNs), meganucleases, transcription activator-like effector nucleases (TALENS)]. More recently, RNA-guided endonucleases (RGENs) have been introduced, and they are directed to their target sites by a complementary RNA molecule. These systems have a DNA-binding domain that localizes the nuclease to a target site. The site is then cut by the nuclease. It is herein acknowledged that these systems are used to induce targeted mutagenesis, induce targeted deletions of cellular DNA sequences, and facilitate targeted recombination of an exogenous donor DNA polynucleotide within a predetermined genomic locus. Most notable and successful of RGENs is Clustered Regularly Interspaced Short Palindromic Repeats/CRISPR-associated nuclease (CRISPR/Cas) with an engineered crRNA/tracr RNA. CRISPR/Cas9 are cognates that find each other on the target DNA.

[0124] It is herein further acknowledged that the CRISPR-Cas9 system has rapidly become a tool of choice in gene editing because it is faster, cheaper, more accurate, and more efficient than other available RGENs. A small fragment of RNA with a short “guide” sequence (gRNA) that binds to a specific target sequence of DNA in a genome, is created. The RNA also binds to the Cas9 enzyme. As in bacteria, the modified RNA is used to recognize the DNA sequence, and the Cas9 enzyme cuts the DNA at the targeted location. Although Cas9 is the enzyme that is used most often, other enzymes (for example Cpf1) can also be used. Once the DNA is cut, the cell's own DNA repair machinery add or delete pieces of genetic material resulting in mutation.

[0125] Ribonucleoprotein Protein Complex (RNP)

[0126] Ribonucleoprotein protein complex is formed when a Cas protein is incubated with gRNA molecules and then transformed into cells in order to induce editing events in the cell. RNP's can be delivered using biolistics.

[0127] Biolistics

[0128] Biolistics is a method for the delivery of nucleic acid and or proteins to cells by high-speed particle bombardment. The technique uses a pressurized gun (gene gun) to forcibly propel a payload comprised of an elemental particle of a heavy metal coated with plasmid DNA to transform plant cellular organelles. After the DNA-carrying vector has been delivered, the DNA is used as a template for transcription and sometimes it integrates into a plant chromosome (“stable” transformation). If the vector also delivered a selectable marker, then stably transformed cells can be selected and cultured. Transformed plants can become totipotent and even display novel and heritable phenotypes.

[0129] It is noted that the skeletal biolistic vector design includes not only the desired gene to be inserted into the cell, but also promoter and terminator sequences as well as a reporter gene used to enable the ensuing detection and removal cells which failed to incorporate the exogenous DNA.

[0130] According to further aspects of the present invention, in addition to DNA, the use of a Cas9 protein and a gRNA molecule could be used for biolistic delivery. The advantage of using a protein and a RNA molecule is that the complex initiates editing upon reaching the cell nucleus: when using DNA for editing, the DNA first has to be transcribed in the nucleus but when using RNA for editing, RNA is translated already in the cytoplasm. This forces the Cas protein to shuttle back to the nucleus, find the relevant guides and only then can editing be achieved.

[0131] As used herein, the term “CRISPR” refers to an acronym that means Clustered Regularly Interspaced Short Palindromic Repeats of DNA sequences. CRISPR is a series of repeated DNA sequences with unique DNA sequences in between the repeats. RNA transcribed from the unique strands of DNA serves as guides for directing cleaving. CRISPR is used as a gene editing tool. In one embodiment, CRISPR is used in conjunction with (but not limited to) Cpf1, Cas9, Cas12, Cas13, Cas14, CasX or CasY.

[0132] As used herein, the term “transformation” refers to the deliberate insertion of genetic material into plant cells. In one embodiment transformation is executed using, but not limited to, bacteria and/or virus. In another embodiment, transformation is executed via biolistics using, but not limited to, DNA or RNPs.

[0133] Thus construct introduction into the plant cells may be performed via Agrobacterium infiltration, virus based plasmids for delivery of the genome editing molecules or mechanical insertion such as polyethylene glycol (PEG) mediated DNA transformation, electroporation or gene gun biolistics.

[0134] It is further within the scope of the present invention that the step of screening the genome of said transformed plant cells for induced targeted (e.g. loss of function) mutation comprises steps of obtaining a nucleic acid sample of said transformed plant and performing a nucleic acid amplification and optionally restriction enzyme digestion to detect a mutation in said at least one gene selected from Glyma.01G239600, Glyma.01G228700, Glyma.10G010500.1, Glyma.11G010500, Glyma.13G173500, Glyma.14G005700, Glyma.17G064400, Glyma.16G149300, Glyma.17G036400, Glyma.17G036300, Glyma.19g135000, Glyma.11 g011500, Glyma.02g005600, Glyma.17g030400 and Glyma19g030500.

[0135] As used herein, the term “Cas” refers to CRISPR associated proteins that act as enzymes cutting the genome at specific sequences. Cas9 refers to a specific group of proteins known in the art. RNA molecules direct various classes of Cas enzymes to cut a certain sequence found in the genome. In one embodiment, the CRISPR/Cas9 system cleaves one or two chromosomal strands at known DNA sequence. In one embodiment, one of the two chromosomal strands is mutated. In one embodiment, two of the two chromosomal strands are mutated.

[0136] As used herein, the term “chromosomal strand” refers to a sequence of DNA within the chromosome. When the CRISPR/Cas9 system cleaves the chromosomal strands, the strands are cut leaving the possibility of one or two strands being mutated, either the template strand or coding strand.

[0137] As used herein, the term “PAM” (protospacer adjacent motif) refers to a targeting component of the transformation expression cassette which is a very short (2-6 base pair) DNA sequence immediately following the DNA sequence targeted by the Cas9 nuclease in the CRISPR system.

[0138] Within the context of this disclosure, other examples of endonuclease enzymes include, but are not limited to, Cpf1, Cas9, Cas12, Cas13, Cas14, CasX or CasY.

[0139] It is within the scope that the current invention concerns or encompass any of the phytoestrogen biosynthesis and elevated protein content associated genes in the Soybean plant, and not limited only to the genes listed in Table 1.

TABLE 1
Soybean genes associate with phytoestrogen biosynthesis and protein accumulation

| | | Genomic | Coding | | |
|---|---|---|---|---|---|
| | | polynucleotide | polynucleotide | Polypeptide | gRNA |
| | | sequence | sequence (CDS) | sequence | sequence |
| Gene annotation | Gene name | SEQ ID NO | SEQ ID NO | SEQ ID NO | SEQ ID NO |
| Glyma.01G239600 | 2- | 1 | 2 | 3 | 4-219 |
| | hydroxyisofavanone | | | | |
| | dehydratase, | | | | |
| | HIDH | | | | |
| Glyma.01G228700 | chalcone synthase, | 220 | 221 | 222 | 223-453 |
| | CHS7 | | | | |
| Glyma.10G010500.1 | Pectinesterase | 454 | 455 | 456 | 457-673 |
| Glyma.11G010500 | 4-coumarate:CoA | 674 | 675 | 676 | 677-1013 |
| | ligase, 4CL13 | | | | |
| Glyma.13G173500 | isofavone synthase, | 1014 | 1015 | 1016 | 1017-1304 |
| | IFS2 | | | | |
| Glyma.14G005700 | chalcone reductase, | 1305 | 1306 | 1307 | 1308-1490 |
| | CHR14 | | | | |
| Glyma.17G064400 | 4-coumarate:CoA | 1491 | 1492 | 1493 | 1494-1797 |
| | ligase | | | | |
| Glyma.16G149300 | cytochrome P450 | 1798 | 1799 | 1800 | 1801-2089 |
| | hydroxylase | | | | |
| Glyma.17G036400 | GmC/VIF2 | 2090 | 2091 | 2092 | 2093-2199 |
| Glyma.17G036300 | GmCIF1 | 2200 | 2201 | 2202 | 2203-2295 |
| Glyma.19g135000 | Fatty acid export | 2296 | 2297 | 2298 | 2299-2629 |
| Glyma.11g011500 | Chalcone synthase | 2630 | 2631 | 2632 | 2633-2809 |
| | 8 | | | | |
| Glyma.02g005600 | Transcription factor | 2810 | 2811 | 2812 | 2813-2972 |
| | MYB13 | | | | |
| Glyma.17g030400 | MLP-like protein | 2973 | 2974 | 2975 | 2976-3042 |
| | 423 | | | | |
| Glyma19g030500 | HXXXD-type acyl- | 3043 | 3044 | 3045 | 3046-3268 |
| | transferase family | | | | |
| | protein | | | | |
| | malonyl- | | | | |
| | CoA:isoflavone 7- | | | | |
| | O-glucoside-6″-O- | | | | |
| | malonyltransferase | | | | |

[0140] It is within the scope of the present invention that the genes presented in Table 1 are involved in phytoestrogen biosynthesis and elevating protein content pathways. Specifically, Glyma.01G239600, Glyma.01G228700, Glyma.10G010500.1, Glyma.11G010500, Glyma.13G173500, Glyma.14G005700, Glyma.17G064400, Glyma.16G149300, Glyma.11g011500, Glyma.02g005600, Glyma.17g030400 and Glyma19g030500 genes are involved in isoflavones and Coumestrol (CM) biosynthesis. Glyma.17G036400, Glyma.17G036300 and Glyma.19g135000 genes are involved in increasing protein content and accumulation in the Soybean plant and/or seed.

[0141] It is herein acknowledged that one of the potent phytoestrogens in Soybean is coumestrol (CM), which is a phytochemical in the class of coumestans, found mainly in Leguminosae (Fabaceae) plants. The CM biosynthesis pathway shares similarities with those of flavones and isoflavones.

[0142] The current invention is aimed at reducing or eliminating phytoestrogen level (such as isoflavones and Coumestrol) in the Soybean plant, using gene editing techniques (i.e. gRNA targeted CRISPR/Cas system).

[0143] According to further aspects of the present invention, Glyma.17G036400 (GmC/VIF2) and Glyma.17G036300 (GmCIF1) are involved in sugar metabolism (e.g. hexoses accumulation) and it is herein acknowledged that silencing their expression improves seed weight and protein content in Soybean. Without wishing to be bound by theory, it is acknowledged that the elevation of Cell wall invertase (CWI) by the silencing of its inhibitor isoforms (GmCIF1 and GmC/VIF2) may facilitate sucrose unloading and release more hexoses, which are required for starch and protein synthesis during seed maturation. In other words, suppression of extracellular invertase inhibitor gene expression improves seed weight and protein content in Soybean. With respect to Glyma.19g135000 gene, it encodes a fatty acid transporter and is involved in protein accumulation in seeds.

[0144] The present invention provides genomic sequence (as well as coding sequence and encoded polypeptide sequence) of the above genes (see Table 1) involved in phytoestrogen biosynthesis and protein accumulation in Soybean. The present invention further provides specific gRNA sequences for targeted in planta editing of each of these genes and thus manipulating their expression, resulting in the desirable traits or properties of reduced phytoestrogen and enhanced protein content in the Soybean plant and seed.

[0145] It is further within the scope that the present invention provides a method of identifying the specific gRNA sequences for each phytoestrogen synthesis gene and/or the genes allowing for higher protein content, paired with specific complementary PAMs. The present invention further discloses the characterization of a plurality of gRNAs directing the CRISPR/Cas system to cleave chromosomal strands coding for genes associated with phytoestrogen synthesis and/or higher protein content, including Glyma.01G239600, Glyma.01G228700, Glyma.10G010500.1, Glyma.11G010500, Glyma.13G173500, Glyma.14G005700, Glyma.17G064400, Glyma.16G149300, Glyma.17G036400, Glyma.17G036300, Glyma.19g135000, Glyma.11g011500, Glyma.02g005600, Glyma.17g030400 and Glyma19g030500 genes (SEQ ID NO: 1, 220, 454, 674, 1014, 1305, 1491, 1798, 2090, 2200, 2296, 2630, 2810, 2973 and 3043, respectively).

[0146] Reference is now made to Table 1, presenting a list of Soybean genes involved in phytoestrogen synthesis and protein accumulation.

[0147] According to one embodiment, the present invention provides a method for eliminating or reducing phytoestrogen content in Soybean plants using gene editing.

[0148] According to a further embodiment, the present invention provides a method for increasing protein content in Soybean plants using gene editing, particularly via gRNA targeted endonuclease.

[0149] According to another embodiment, the present invention provides a method for eliminating or reducing phytoestrogen level and/or increasing protein content in Soybean plants, particularly via gRNA targeted endonuclease.

[0150] According some aspects, the method of the present invention comprising steps of;
[0151] a) selecting a gene involved in the phytoestrogen synthesis and/or in protein accumulation pathway (e.g. fatty acid transport and/or sugar metabolism) of the Soybean species;
[0152] b) synthesizing or designing a gRNA expression cassette corresponding to a targeted cleavage locus or region or domain within the selected gene (in the coding region or regulatory region) along the Soybean genome;
[0153] c) transforming said Soybean plant cells with CRISPR/Cas9 and the gRNA expression cassette;
[0154] d) culturing said transformed Soybean plant cells;
[0155] e) selecting said Soybean cells which express desired mutations in the editing target region, and
[0156] f) regenerating a plant from said transformed plant cell, plant cell nucleus, or plant tissue.

[0157] According to a further embodiment of the present invention, the gene involved in phytoestrogen synthesis of said Soybean species is selected from the group comprising Glyma.01G239600, Glyma.01G228700, Glyma.10G010500.1, Glyma.11G010500, Glyma.13G173500, Glyma.14G005700, Glyma.17G064400, Glyma.16G149300, Glyma.11g011500, Glyma.02g005600, Glyma.17g030400 and Glyma19g030500 (SEQ ID NO: 1, 220, 454, 674, 1014, 1305, 1491, 1798, 2630, 2810, 2973 and 3043, respectively).

[0158] According to a further embodiment of the present invention, the gene involved in protein content accumulation of said Soybean species is selected from the group comprising Glyma.17G036400, Glyma.17G036300 and Glyma.19g135000 (SEQ ID NO: 2090, 2200 and 2296, respectively).

[0159] According to a further embodiment of the present invention, the gRNAs and their corresponding PAMs are selected from a group comprising a sequence comprising at least 85% sequence identity to at least one of SEQ ID NO: 4-219, SEQ ID NO: 223-453, SEQ ID NO: 457-673, SEQ ID NO: 677-1013, SEQ ID NO: 1017-1304, SEQ ID NO: 1308-1490, SEQ ID NO: 1494-1797, SEQ ID NO: 1801-2089, SEQ ID NO: 2093-2199, SEQ ID NO: 2203-2295, SEQ ID NO: 2299-2629, SEQ ID NO: 2633-2809, SEQ ID NO: 2813-2972, SEQ ID NO: 2976-3042 or SEQ ID NO: 3046-3268 targeted to Glyma.01G239600, Glyma.01G228700, Glyma.10G010500.1, Glyma.11G010500, Glyma.13G173500, Glyma.14G005700, Glyma.17G064400, Glyma.16G149300, Glyma.17G036400, Glyma.17G036300, Glyma.19g135000, Glyma.11g011500, Glyma.02g005600, Glyma.17g030400 and Glyma19g030500 genes, respectively.

[0160] It is further within the scope of the current invention that the target domain sequence is selected from the group comprising 1) a nucleic acid sequence encoding the polypeptide of any of the SEQ ID NO: 3, 222, 456, 676, 1016, 1307, 1493, 1800, 2092, 2202, 2298, 2632, 2812, 2975 and 3045, (2) a nucleic acid sequence comprising the sequence of any of SEQ ID NO: 1, 220, 454, 674, 1014, 1305, 1491, 1798, 2090, 2200, 2296, 2630, 2810, 2973 and 3043, and (3) a nucleic acid sequence having at least 80% sequence identity to at least 200 contiguous nucleotides of the nucleic acid sequence of SEQ ID NO: 1, 220, 454, 674, 1014, 1305, 1491, 1798, 2090, 2200, 2296, 2630, 2810, 2973 and 3043.

[0161] According to a further embodiment of the present invention, the transformation is carried out using Agrobacterium to deliver an expression cassette comprising a) a selection marker, b) a nucleotide sequence encoding one or more gRNA molecules comprising a DNA sequence which is complementary with a target domain sequence within a gene selected from Glyma.01G239600, Glyma.01G228700, Glyma.10G010500.1, Glyma.11G010500, Glyma.13 G173500, Glyma.14G005700, Glyma.17G064400, Glyma.16G149300, Glyma.17G036400, Glyma.17G036300, Glyma.19g135000, Glyma.11g011500, Glyma.02g005600, Glyma.17g030400 and Glyma19g030500, SEQ ID NO: 1, 220, 454, 674, 1014, 1305, 1491, 1798, 2090, 2200, 2296, 2630, 2810, 2973 and 3043, respectively.

[0162] According to a further embodiment of the present invention, the nucleotide sequence encoding a Cas molecule may be from, but not limited to Streptococcus pyogenes and/or Staphylococcus aureus (PAM sequences NGG and NNGRRT respectively). Other optional PAM within the scope of the present invention include, NNNNGATT (NmeCas9), NNAGAAW (StCas9), NAAAAC (TdCas9) and NNGRRT (SaCas9).

[0163] According to a further embodiment, the method of the present invention comprises administering a nucleic acid composition that comprises: a) a first nucleotide sequence encoding a gRNA molecule and b) a second nucleotide sequence encoding a Cas molecule.

[0164] According to a further embodiment of the present invention, the CRISPR/Cas system is delivered to the cell by a plant virus.

[0165] According to a further embodiment of the present invention, the Cas protein is selected from a group comprising, but not limited to, Cpf1, Cas9, Cas12, Cas13, Cas14, CasX or CasY.

[0166] It is further within the scope of the present invention to provide a method for increasing Soybean yield. The method comprising steps of: (a) introducing into a Soybean plant or a cell thereof (i) at least one RNA-guided endonuclease comprising at least one nuclear localization signal or nucleic acid encoding at least one RNA-guided endonuclease comprising at least one nuclear localization signal, (ii) at least one guide RNA or DNA encoding at least one guide RNA, and, optionally, (iii) at least one donor polynucleotide; and (b) culturing the Soybean plant or cell thereof such that each guide RNA directs an RNA-guided endonuclease to a targeted site in the chromosomal sequence where the RNA-guided endonuclease introduces a double-stranded break in the targeted site, and the double-stranded break is repaired by a DNA repair process such that the chromosomal sequence is modified, wherein the targeted site is located in at least one of Glyma.01G239600, Glyma.01G228700, Glyma.10G010500.1, Glyma.11G010500, Glyma.13G173500, Glyma.14G005700, Glyma.17G064400, Glyma.16G149300, Glyma.17G036400, Glyma.17G036300, Glyma.19g135000, Glyma.11g011500, Glyma.02g005600, Glyma.17g030400 and Glyma19g030500 genes comprising a genomic sequence as set forth in SEQ ID NO: 1, 220, 454, 674, 1014, 1305, 1491, 1798, 2090, 2200, 2296, 2630, 2810, 2973 and 3043, respectively, or a functional variant thereof, and the chromosomal modification interrupts or interferes with transcription and/or translation of the at least one of the aforementioned genes.

[0167] According to a further embodiment of the present invention, the RNA-guided endonuclease is derived from a clustered regularly interspersed short palindromic repeats (CRISPR)/CRISPR-associated (Cas) system.

[0168] According to a further embodiment, the present invention discloses the gene editing of each of the following genes: Glyma.01G239600, Glyma.01G228700, Glyma.10G010500.1, Glyma.11G010500, Glyma.13G173500, Glyma.14G005700, Glyma.17G064400, Glyma.16G149300, Glyma.17G036400, Glyma.17G036300, Glyma.19g135000, Glyma.11g011500, Glyma.02g005600, Glyma.17g030400 and Glyma19g030500 (SEQ ID NO: 1, 220, 454, 674, 1014, 1305, 1491, 1798, 2090, 2200, 2296, 2630, 2810, 2973 and 3043, respectively).

[0169] According to a further embodiment, the present invention provides a method that does not insert exogenous genetic material, but produces a non-naturally occurring Soybean plant or cell thereof.

[0170] According to a further embodiment, the present invention provides a method for manipulating Soybean protein, sugar and phytoestrogen synthesis genes by steps of:
[0171] (a) identifying at least one locus within a DNA sequence in a Soybean plant or a cell thereof for Glyma.01G239600, Glyma.01G228700, Glyma.10G010500.1, Glyma.11G010500, Glyma.13G173500, Glyma.14G005700, Glyma.17G064400, Glyma.16G149300, Glyma.17G036400, Glyma.17G036300, Glyma.19g135000, Glyma.11g011500, Glyma.02g005600, Glyma.17g030400 and Glyma19g030500 genes (sequence comprising at least 80% sequence identity to SEQ ID NO: 1, 220, 454, 674, 1014, 1305, 1491, 1798, 2090, 2200, 2296, 2630, 2810, 2973 and 3043, respectively);
[0172] (b) identifying at least one custom endonuclease recognition sequence within the at least one locus of Glyma.01G239600, Glyma.01G228700, Glyma.10G010500.1, Glyma.11 G010500, Glyma.13G173500, Glyma.14G005700, Glyma.17G064400, Glyma.16G149300, Glyma.17G036400, Glyma.17G036300, Glyma.19g135000, Glyma.11g011500, Glyma.02g005600, Glyma.17g030400 and Glyma19g030500 genes (sequence comprising at least 80% sequence identity to SEQ ID NO: 1, 220, 454, 674, 1014, 1305, 1491, 1798, 2090, 2200, 2296, 2630, 2810, 2973 and 3043, respectively); and
[0173] (e) identifying the Soybean plant, a cell thereof, or a progeny cell thereof as comprising a modification in a loci of at least one of Glyma.01G239600, Glyma.01G228700, Glyma.10G010500.1, Glyma.11 G010500, Glyma.13G173500, Glyma.14G005700, Glyma.17G064400, Glyma.16G149300, Glyma.17G036400, Glyma.17G036300, Glyma.19g135000, Glyma.11g011500, Glyma.02g005600, Glyma.17g030400 and Glyma19g030500 genes (sequence comprising at least 80% sequence identity to SEQ ID NO: 1, 220, 454, 674, 1014, 1305, 1491, 1798, 2090, 2200, 2296, 2630, 2810, 2973 and 3043, respectively).

[0174] According to a further embodiment, the present invention provides a transgenic Soybean plant produced by the method as defined in any of the above.

[0175] It is further within the scope to provide a method for editing of genes involved in the protein, and/or phytoestrogen synthesis pathway, e.g. Glyma.01G239600, Glyma.01G228700, Glyma.10G010500.1, Glyma.11 G010500, Glyma.13G173500, Glyma.14G005700, Glyma.17G064400, Glyma.16G149300, Glyma.17G036400, Glyma.17G036300, Glyma.19g135000, Glyma.11g011500, Glyma.02g005600, Glyma.17g030400 and Glyma19g030500 genes.

[0176] It is further within the scope of the present invention that the method as defined above comprises identifying and targeting the specific gRNA sequence for each individual gene defined in Table 1, constructing specific gRNAs for that region in each individual gene, thereby silencing (or alternatively enhancing) by use of gene editing technology the above-mentioned genes.

[0177] According to a further embodiment, the present invention provides a genome edited Soybean plant produced by the method as defined in any of the above, having elevated levels of protein as compared to control non edited Soybean plant.

[0178] According to a further embodiment, the present invention provides a genome edited Soybean plant produced by the method as defined in any of the above, having lower or decreased concentrations of phytoestrogen as compared to control non-edited Soybean plant.

[0179] As used herein the term “about” denotes ±25% of the defined amount or measure or value.

[0180] As used herein the term “similar” denotes a correspondence or resemblance range of about ±20%, particularly ±15%, more particularly about ±10% and even more particularly about ±5%.

[0181] As used herein the term “corresponding” generally means similar, analogous, like, alike, akin, parallel, identical, resembling or comparable. In further aspects it means having or participating in the same relationship (such as type or species, kind, degree, position, correspondence, or function). It further means related or accompanying. In some embodiments of the present invention it refers to plants of the same Soybean species or strain or variety or to sibling plant, or one or more individuals having one or both parents in common.

[0182] The term “corresponding” or “corresponding to” or “corresponding to nucleotide sequence” or “corresponding to position” as used herein, also refers in the context of the present invention to sequence homology or sequence identity. These terms relate to two or more nucleic acid or protein sequences, that are the same or have a specified percentage of amino acid residues or nucleotides that are the same, when compared and aligned for maximum correspondence, as measured using one of the available sequence comparison algorithms or by visual inspection. If two sequences, which are to be compared with each other, differ in length, sequence identity preferably relates to the percentage of the nucleotide residues of the shorter sequence, which are identical with the nucleotide residues of the longer sequence. As used herein, the percent of identity or homology between two sequences is a function of the number of identical positions shared by the sequences, taking into account the number of gaps, and the length of each gap, which needs to be introduced for optimal alignment of the two sequences. The comparison of sequences and determination of identity percent between two sequences can be accomplished using a mathematical algorithm as known in the relevant art. According to further aspects of the invention, the term “corresponding to the nucleotide sequence” or “corresponding to position”, refers to variants, homologues and fragments of the indicated nucleotide sequence, which possess or perform the same biological function or correlates with the same phenotypic characteristic of the indicated nucleotide sequence.

[0183] Another indication that two nucleic acid sequences are substantially identical or that a sequence is “corresponding to the nucleotide sequence” is that the two molecules hybridize to each other under stringent conditions. High stringency conditions, such as high hybridization temperature and low salt in hybridization buffers, permits only hybridization between nucleic acid sequences that are highly similar, whereas low stringency conditions, such as lower temperature and high salt, allows hybridization when the sequences are less similar.

[0184] In other embodiments of the invention, such substantially identical sequences refer to polynucleotide or amino acid sequences that share at least about 80% similarity or identity, preferably at least about 90% similarity or identity, alternatively, about 95%, 96%, 97%, 98% or 99% similarity or identity to the indicated polynucleotide or amino acid sequences.

[0185] According to other aspects of the invention, the term “corresponding” refers also to complementary sequences or base pairing such that when they are aligned antiparallel to each other, the nucleotide bases at each position in the sequences will be complementary. The degree of complementarity between two nucleic acid strands may vary.

[0186] A “plant” as used herein refers to any plant at any stage of development, particularly a seed plant. The term “plant” includes the whole plant or any parts or derivatives thereof.

[0187] The term “plant cell” used herein refers to a structural and physiological unit of a plant, comprising a protoplast and a cell wall. The plant cell may be in a form of an isolated single cell or a cultured cell.

[0188] The term “plant cell culture” as used herein means cultures of plant units such as, for example, protoplasts, regenerable cells, cell culture, cells, cells in plant tissues, pollen, pollen tubes, ovules, embryo sacs, zygotes and embryos at various stages of development, leaves, roots, root tips, anthers, meristematic cells, microspores, flowers, cotyledons, pistil, fruit, seeds, seed coat or any combination thereof.

[0189] The term “plant material” or “plant part” used herein refers to leaves, stems, roots, root tips, flowers or flower parts, fruits, pollen, egg cells, zygotes, seeds, seed coat, cuttings, cell or tissue cultures, or any other part or product of a plant or a combination thereof. It further refers to plant cells, seeds, plant protoplasts, plant cell tissue culture from which plants can be regenerated, plant callus or calli, meristematic cells, microspores, embryos, immature embryos, pollen, ovules, anthers, fruit, flowers, leaves, cotyledons, pistil, seeds, seed coat, roots, root tips and the like.

[0190] A “plant organ” as used herein means a distinct and visibly structured and differentiated part of a plant such as a root, stem, leaf, flower, flower bud, or embryo.

[0191] The term “Plant tissue” as used herein means a group of plant cells organized into a structural and functional unit. Any tissue of a plant in planta or in culture is included. This term includes, but is not limited to, whole plants, plant organs, plant seeds, tissue culture, protoplasts, meristematic cells, calli and any group of plant cells organized into structural and/or functional units. The use of this term in conjunction with, or in the absence of, any specific type of plant tissue as listed above or otherwise embraced by this definition is not intended to be exclusive of any other type of plant tissue.

[0192] As used herein, the term “progeny” or “progenies” refers in a non limiting manner to offspring or descendant plants. According to certain embodiments, the term “progeny” or “progenies” refers to plants developed or grown or produced from the disclosed or deposited seeds as detailed inter alia. The grown plants preferably have the desired traits of the disclosed or deposited seeds, i.e. mutation, preferable loss of function mutation, in at least one gene selected from Glyma.01G239600, Glyma.01G228700, Glyma.10G010500.1, Glyma.11G010500, Glyma.13G173500, Glyma.14G005700, Glyma.17G064400, Glyma.16G149300, Glyma.17G036400, Glyma.17G036300, Glyma.19g135000, Glyma.11g011500, Glyma.02g005600, Glyma.17g030400 and Glyma19g030500.

[0193] As used herein the term “genetic modification” or “genome modification” refers hereinafter to genetic manipulation or modulation, which is the direct manipulation of an organism's genes using biotechnology. It also refers to a set of technologies used to change the genetic makeup of cells, including the transfer of genes within and across species, targeted mutagenesis and genome editing technologies to produce improved organisms. According to main embodiments of the present invention, modified Soybean plants free of or with reduced phytoestrogen content are generated using genome editing mechanism. This technique enables to achieve in planta modification of specific genes that relate to and/or control phytoestrogen biosynthesis and/or protein content in Soybean plant or seed.

[0194] The term “genome editing”, or “genome/genetic modification” or “genome engineering” generally refers hereinafter to a type of genetic engineering in which DNA is inserted, deleted, modified or replaced in the genome of a living organism. Unlike previous genetic engineering techniques that randomly insert genetic material into a host genome, genome editing targets the insertions to site specific locations. In the context of the present invention, the term also include base editing technique.

[0195] It is within the scope of the present invention that the common methods for such editing use engineered nucleases, or “molecular scissors”. These nucleases create site-specific double-strand breaks (DSBs) at desired locations in the genome. The induced double-strand breaks are repaired through nonhomologous end-joining (NHEJ) or homologous recombination (HR), resulting in targeted mutations (‘edits’). Families of engineered nucleases used by the current invention include, but are not limited to: meganucleases, zinc finger nucleases (ZFNs), transcription activator-like effector-based nucleases (TALEN), and the clustered regularly interspaced short palindromic repeats (CRISPR/Cas9) system.

[0196] The term “base editing” or “base-editing” in the context of the present invention refers to a genome editing approach that uses components from CRISPR systems together with other enzymes to directly introduce point mutations into cellular DNA or RNA without making double-stranded DNA breaks (DSBs). It is within the scope that DNA base editors comprise a catalytically disabled or inactivated nuclease, called herein nickase (nCas) fused to a nucleobase deaminase enzyme or a DNA glycosylase inhibitor. It is acknowledged that RNA base editors achieve analogous changes using components that target RNA. According to aspects of the present invention, base editors directly convert one base or base pair into another, enabling the efficient introduction of specific and precise point mutations in non-dividing cells without generating excess undesired editing byproducts such as indels, translocations, and rearrangements derived from DSBs created by nucleases such as Cas9 or any other Cas.

[0197] It is further within the scope of the current invention that DNA base editors (BEs) comprise fusions between a catalytically impaired Cas nuclease and a base-modification enzyme that operates on single-stranded DNA (ssDNA) but not double-stranded DNA (dsDNA). Without wishing to be bound by theory, it is noted that upon binding to its target locus in DNA, base pairing between the guide RNA and target DNA strand leads to displacement of a small segment of single-stranded DNA in an “R-loop”. DNA bases within this single-stranded DNA bubble are modified by the deaminase enzyme. To improve efficiency in eukaryotic cells, the catalytically disabled nuclease also generates a nick in the non-edited DNA strand, inducing cells to repair the non-edited strand using the edited strand as a template.

[0198] It is within the scope of the present invention that two classes of DNA base editor have been described: cytosine base editors (CBEs) which convert a CG base pair into a TA base pair, and adenine base editors (ABEs) which convert an AT base pair to a GC base pair. Together, CBEs and ABEs can mediate all four possible transition mutations (C to T, A to G, T to C, and G to A). In RNA, targeted adenosine conversion to inosine has been used in both antisense and Cas13-guided RNA-targeting methods.

[0199] Reference is now made to exemplary genome editing terms used by the current disclosure:

Genome Editing Glossary

| | |
|---|---|
| Cas = CRISPR-associated genes | Indel = insertion and/or deletion |
| Cas9, Csn1 = a CRISPR-associated protein | NHEJ = Non-Homologous End Joining |
| containing two nuclease domains, that is | PAM = Protospacer-Adjacent Motif |
| programmed by small RNAs to cleave DNA | RuvC = an endonuclease domain named for |
| crRNA = CRISPR RNA | an E. coli protein involved in DNA repair |
| dCAS9 = nuclease-deficient Cas9 | sgRNA = single guide RNA |
| DSB = Double-Stranded Break | tracrRNA, trRNA = trans-activating crRNA |
| gRNA = guide RNA | TALEN = Transcription-Activator Like |
| HDR = Homology-Directed Repair | Effector Nuclease |
| HNH = an endonuclease domain named | ZFN = Zinc-Finger Nuclease |
| for characteristic histidine and asparagine | |
| residues | |

[0200] According to specific aspects of the present invention, the CRISPR (Clustered Regularly Interspaced Short Palindromic Repeats) and CRISPR-associated (Cas) genes are used for the first time for generating genome modification in targeted genes in Soybean plant. It is herein acknowledged that the functions of CRISPR (Clustered Regularly Interspaced Short Palindromic Repeats) and CRISPR-associated (Cas) genes are essential in adaptive immunity in select bacteria and archaea, enabling the organisms to respond to and eliminate invading genetic material. These repeats were initially discovered in the 1980s in E. coli. Without wishing to be bound by theory, reference is now made to a type of CRISPR mechanism, in which invading DNA from viruses or plasmids is cut into small fragments and incorporated into a CRISPR locus comprising a series of short repeats (around 20 bps). The loci are transcribed, and transcripts are then processed to generate small RNAs (crRNA, namely CRISPR RNA), which are used to guide effector endonucleases that target invading DNA based on sequence complementarity.

[0201] According to further aspects of the invention, Cas protein, such as Cas9 (also known as Csn1) is required for gene silencing. Cas9 participates in the processing of crRNAs, and is responsible for the destruction of the target DNA. Cas9's function in both of these steps relies on the presence of two nuclease domains, a RuvC-like nuclease domain located at the amino terminus and a HNH-like nuclease domain that resides in the mid-region of the protein. To achieve site-specific DNA recognition and cleavage, Cas9 is complexed with both a crRNA and a separate trans-activating crRNA (tracrRNA or trRNA), that is partially complementary to the crRNA. The tracrRNA is required for crRNA maturation from a primary transcript encoding multiple pre-crRNAs. This occurs in the presence of RNase III and Cas9.

[0202] Without wishing to be bound by theory, it is herein acknowledged that during the destruction of target DNA, the HNH and RuvC-like nuclease domains cut both DNA strands, generating double-stranded breaks (DSBs) at sites defined by a 20-nucleotide target sequence within an associated crRNA transcript. The HNH domain cleaves the complementary strand, while the RuvC domain cleaves the noncomplementary strand.

[0203] It is further noted that the double-stranded endonuclease activity of Cas9 also requires that a short conserved sequence, (2-5 nts) known as protospacer-associated motif (PAM), follows immediately 3′- of the crRNA complementary sequence.

[0204] According to further aspects of the invention, a two-component system may be used by the current invention, combining trRNA and crRNA into a single synthetic single guide RNA (sgRNA) for guiding targeted gene alterations.

[0205] It is further within the scope that Cas9 nuclease variants include wild-type Cas9, Cas9D10A, or Cas having a mutation resulting in a nickase Cas (nCas).

[0206] Reference is now made to an example of CRISPR/Cas9 mechanism of action as depicted by Xie, Kabin, and Yinong Yang. “RNA-guided genome editing in plants using a CRISPR-Cas system.” Molecular plant 6.6 (2013): 1975-1983. As shown in this figure, the Cas9 endonuclease forms a complex with a chimeric RNA (called guide RNA or gRNA), replacing the crRNA-transcrRNA heteroduplex, and the gRNA could be programmed to target specific sites. The gRNA-Cas9 should comprise at least 15-base-pairing (gRNA seed region) without mismatch between the 5′-end of engineered gRNA and targeted genomic site, and an NGG motif (called protospacer-adjacent motif or PAM) that follows the base-pairing region in the complementary strand of the targeted DNA.

[0207] It is within the scope of the present invention that the Cas gene may be selected from the group consisting of Cas3, Cas4, Cas5, Cas5e (or CasD), Cas6, Cas6e, Cas6f, Cas7, Cas8a1, Cas8a2, Cas8b, Cas8c, Cas9, Cas10, Cast10d, Cas12, Cas13, Cas14, CasX, CasY, CasF, CasG, CasH, Csy1, Csy2, Csy3, Cse1 (or CasA), Cse2 (or CasB), Cse3 (or CasE), Cse4 (or CasC), Csc1, Csc2, Csa5, Csn1, Csn2, Csm2, Csm3, Csm4, Csm5, Csm6, Cmr1, Cmr3, Cmr4, Cmr5, Cmr6, Cpf1, Csb1, Csb2, Csb3, Csx17, Csx14, Csx10, Csx16, CsaX, Csx3, Csz1, Csx15, Csf1, Csf2, Csf3, Csf4, and Cu1966, bacteriophages Cas such as Casa, (Cas-phi), Cast2f1, split Cas such as split Cas12a or split Cas9 or D10A or mutation resulting in a nickase Cas (nCas) and any combination thereof.

[0208] It is further within the scope of the present invention that the gRNA or sgRNA sequence comprises a 3′ Protospacer Adjacent Motif (PAM) selected from the group consisting of NGG (SpCas), NNNNGATT (NmeCas9), NNAGAAW (StCas9), NAAAAC (TdCas9), NNGRRT (SaCas9), TTTR PAM (Cas12f1) and TBN (Cas-phi).

[0209] A guide nucleic acid includes gRNA, gDNA, crRNA and crDNA. The term “meganucleases” as used herein refers hereinafter to endodeoxyribonucleases characterized by a large recognition site (double-stranded DNA sequences of 12 to 40 base pairs); as a result this site generally occurs only once in any given genome. Meganucleases are therefore considered to be the most specific naturally occurring restriction enzymes.

[0210] The term “protospacer adjacent motif” or “PAM” as used herein refers hereinafter to a 2-6 base pair DNA sequence immediately following the DNA sequence targeted by the Cas9 nuclease in the CRISPR bacterial adaptive immune system. PAM is a component of the invading virus or plasmid, but is not a component of the bacterial CRISPR locus. PAM is an essential targeting component which distinguishes bacterial self from non-self DNA, thereby preventing the CRISPR locus from being targeted and destroyed by nuclease.

[0211] The term “Next-generation sequencing” or “NGS” as used herein refers hereinafter to massively, parallel, high-throughput or deep sequencing technology platforms that perform sequencing of millions of small fragments of DNA in parallel. Bioinformatics analyses are used to piece together these fragments by mapping the individual reads to the reference genome.

[0212] The term “gene knockdown” as used herein refers hereinafter to an experimental technique by which the expression of one or more of an organism's genes is reduced. The reduction can occur through genetic modification, i.e. targeted genome editing or by treatment with a reagent such as a short DNA or RNA oligonucleotide that has a sequence complementary to either gene or an mRNA transcript. The reduced expression can be at the level of RNA or at the level of protein. It is within the scope of the present invention that the term gene knockdown also refers to a loss of function mutation and/or gene knockout mutation in which an organism's genes is made inoperative or nonfunctional.

[0213] The term “gene silencing” as used herein refers hereinafter to the regulation of gene expression in a cell to prevent the expression of a certain gene. Gene silencing can occur during either transcription or translation. In certain aspects of the invention, gene silencing is considered to have a similar meaning as gene knockdown. When genes are silenced, their expression is reduced. In contrast, when genes are knocked out, they are completely not expressed. Gene silencing may be considered a gene knockdown mechanism since the methods used to silence genes, such as RNAi, CRISPR, or siRNA, generally reduce the expression of a gene by at least 70% but do not completely eliminate it.

[0214] The term “loss of function mutation” as used herein refers to a type of mutation in which the altered gene product lacks the function of the wild-type gene. A synonyms of the term included within the scope of the present invention is null mutation.

[0215] The term “microRNAs” or “miRNAs” refers hereinafter to small non-coding RNAs that have been found in most of the eukaryotic organisms. They are involved in the regulation of gene expression at the post-transcriptional level in a sequence specific manner MiRNAs are produced from their precursors by Dicer-dependent small RNA biogenesis pathway. MiRNAs are candidates for studying gene function using different RNA-based gene silencing techniques. For example, artificial miRNAs (amiRNAs) targeting one or several genes of interest is a potential tool in functional genomics.

[0216] The term “in planta” means in the context of the present invention within the plant or plant cells. More specifically, it means introducing CRISPR/Cas complex into plant material comprising a tissue culture of several cells, a whole plant, or into a single plant cell, without introducing a foreign gene or a mutated gene. It also used to describe conditions present in a non-laboratory environment (e.g. in vivo).

[0217] The term “orthologue” as used herein refers hereinafter to one of two or more homologous gene sequences found in different species. In the context of the present invention it includes homologs, orthologs, paralogs and variants.

[0218] The term “functional variant” or “functional variant of a nucleic acid, polynucleotide, amino acid, polypeptide or protein sequence” as used herein, for example with reference to SEQ ID NOs: 1-3268, refers to a variant, homolog, orthologue or paralog of a sequence or part of a sequence which retains the biological function of the full non-variant allele and hence has the activity of the expressed gene or protein. A functional variant also comprises a variant of the gene of interest encoding a polypeptide which has sequence alterations that do not affect function of the resulting protein, for example, in non-conserved residues. Also encompassed is a variant that is substantially identical, i.e. has only some sequence variations, for example, in non-conserved residues, to the wild type nucleic acid or amino acid sequences of the alleles as shown herein, and is biologically active.

[0219] The term “variety” or “cultivar” used herein means a group of similar plants that by structural features and performance can be identified from other varieties within the same species.

[0220] The term “allele” used herein means any of one or more alternative or variant forms of a gene or a genetic unit at a particular locus, all of which alleles relate to one trait or characteristic at a specific locus. In a diploid cell of an organism, alleles of a given gene are located at a specific location, or locus (loci plural) on a chromosome. Alternative or variant forms of alleles may be the result of single nucleotide polymorphisms, insertions, inversions, translocations or deletions, or the consequence of gene regulation caused by, for example, by chemical or structural modification, transcription regulation or post-translational modification/regulation. An allele associated with a qualitative trait may comprise alternative or variant forms of various genetic units including those mat are identical or associated with a single gene or multiple genes or their products or even a gene disrupting or controlled by a genetic factor contributing to the phenotype represented by the locus. According to further embodiments, the term “allele” designates any of one or more alternative forms of a gene at a particular locus. Heterozygous alleles are two different alleles at the same locus. Homozygous alleles are two identical alleles at a particular locus. A wild type allele is a naturally occurring allele.

[0221] As used herein, the term “locus” (loci plural) means a specific place or places or region or a site on a chromosome where for example a gene or genetic marker element or factor is found. In specific embodiments, such a genetic element is contributing to a trait.

[0222] As used herein, the term “homozygous” refers to a genetic condition or configuration existing when two identical or like alleles reside at a specific locus, but are positioned individually on corresponding pairs of homologous chromosomes in the cell of a diploid organism.

[0223] Conversely, as used herein, the term “heterozygous” means a genetic condition or configuration existing when two different or unlike alleles reside at a specific locus, but are positioned individually on corresponding pairs of homologous chromosomes in the cell of a diploid organism.

[0224] As used herein, the phrase “genetic marker” or “molecular marker” or “biomarker” refers to a feature in an individual's genome e.g., a nucleotide or a polynucleotide sequence that is associated with one or more loci or trait of interest In some embodiments, a genetic marker is polymorphic in a population of interest, or the locus occupied by the polymorphism, depending on context. Genetic markers or molecular markers include, for example, single nucleotide polymorphisms (SNPs), indels (i.e. insertions deletions), simple sequence repeats (SSRs), restriction fragment length polymorphisms (RFLPs), random amplified polymorphic DNAs (RAFDs), cleaved amplified polymorphic sequence (CAPS) markers, Diversity Arrays Technology (DArT) markers, and amplified fragment length polymorphisms (AFLPs) or combinations thereof, among many other examples such as the DNA sequence per se. Genetic markers can, for example, be used to locate genetic loci containing alleles on a chromosome that contribute to variability of phenotypic traits. The phrase “genetic marker” or “molecular marker” or “biomarker” can also refer to a polynucleotide sequence complementary or corresponding to a genomic sequence, such as a sequence of a nucleic acid used as a probe or primer.

[0225] As used herein, the term “germplasm” refers to the totality of the genotypes of a population or other group of individuals (e.g., a species). The term “germplasm” can also refer to plant material; e.g., a group of plants that act as a repository for various alleles. Such germplasm genotypes or populations include plant materials of proven genetic superiority; e.g., for a given environment or geographical area, and plant materials of unknown or unproven genetic value; that are not part of an established breeding population and that do not have a known relationship to a member of the established breeding population.

[0226] The terms “hybrid”, “hybrid plant” and “hybrid progeny” used herein refers to an individual produced from genetically different parents (e.g., a genetically heterozygous or mostly heterozygous individual).

[0227] As used herein, “sequence identity” or “identity” in the context of two nucleic acid or polypeptide sequences makes reference to the residues in the two sequences that are the same when aligned for maximum correspondence over a specified comparison window. When percentage of sequence identity is used in reference to proteins, it is recognized that residue positions which are not identical often differ by conservative amino acid substitutions, where amino acid residues are substituted for other amino acid residues with similar chemical properties (e.g., charge or hydrophobicity) and therefore do not change the functional properties of the molecule. The term further refers hereinafter to the amount of characters which match exactly between two different sequences. Hereby, gaps are not counted and the measurement is relational to the shorter of the two sequences.

[0228] It is further within the scope that the terms “similarity” and “identity” additionally refer to local homology, identifying domains that are homologous or similar (in nucleotide and/or amino acid sequence). It is acknowledged that bioinformatics tools such as BLAST, SSEARCH, FASTA, and HMMER calculate local sequence alignments which identify the most similar region between two sequences. For domains that are found in different sequence contexts in different proteins, the alignment should be limited to the homologous domain, since the domain homology is providing the sequence similarity captured in the score. According to some aspects the term similarity or identity further includes a sequence motif, which is a nucleotide or amino-acid sequence pattern that is widespread and has, or is conjectured to have, a biological significance. Proteins may have a sequence motif and/or a structural motif, a motif formed by the three-dimensional arrangement of amino acids which may not be adjacent.

[0229] As used herein, the terms “nucleic acid”, “nucleic acid sequence”, “nucleotide”, “nucleic acid molecule” or “polynucleotide” are intended to include DNA molecules (e.g., cDNA or genomic DNA), RNA molecules (e.g., mRNA), natural occurring, mutated, synthetic DNA or RNA molecules, and analogs of the DNA or RNA generated using nucleotide analogs. It can be single-stranded or double-stranded. Such nucleic acids or polynucleotides include, but are not limited to, coding sequences of structural genes, anti-sense sequences, and non-coding regulatory sequences that do not encode mRNAs or protein products. These terms also encompass a gene. The term “gene”, “allele” or “gene sequence” is used broadly to refer to a DNA nucleic acid associated with a biological function. Thus, genes may include introns and exons as in the genomic sequence, or may comprise only a coding sequence as in cDNAs, and/or may include cDNAs in combination with regulatory sequences. Thus, according to the various aspects of the invention, genomic DNA, cDNA or coding DNA may be used. In one embodiment, the nucleic acid is cDNA or coding DNA.

[0230] The terms “peptide”, “polypeptide” and “protein” are used interchangeably herein and refer to amino acids in a polymeric form of any length, linked together by peptide bonds.

[0231] According to other aspects of the invention, a “modified” or a “mutant” plant is a plant that has been altered compared to the naturally occurring wild type (WT) plant. Specifically, the endogenous nucleic acid sequences of each of the Soybean homologs (nucleic acid sequences comprising SEQ ID NO: 1, 2, 220, 221, 454, 455, 674, 675, 1014, 1015, 1305, 1306, 1491, 1492, 1798, 1799, 2090, 2091, 2200, 2201, 2296, 2297, 2630, 2631, 2810, 2811, 2973, 2974, 3043 and 3044) have been altered compared to wild type sequences using genome editing methods as described herein. This causes inactivation of the endogenous genes and thus disables their function (reduce or silence the expression or function of the endogenous genes). In alternative embodiments it may enhance the expression or function of the endogenous genes. Such plants have an altered phenotype and show decreased phytoestrogen content (decreased expression of genes involved in phytoestrogen biosynthesis) and/or increased protein content traits compared to wild type plants.

[0232] Therefore, the aforementioned traits are conferred by the presence of at least one mutated endogenous gene selected from Glyma.01G239600, Glyma.01G228700, Glyma.10G010500.1, Glyma.11G010500, Glyma.13G173500, Glyma.14G005700, Glyma.17G064400, Glyma.16G149300, Glyma.17G036400, Glyma.17G036300, Glyma.19g135000, Glyma.11g011500, Glyma.02g005600, Glyma.17g030400 and Glyma19g030500 in the Soybean plant genome which has been specifically targeted using genome editing technique (gRNA targeted endonuclease, such as the CRISPR/Cas system).

[0233] Main aspects of the invention involve targeted mutagenesis methods, specifically genome editing, and exclude embodiments that are solely based on generating plants by traditional breeding methods. In a further embodiment of the current invention, as explained herein, the trait of reduced phytoestrogen content and/or increased protein accumulation is not due to the presence of a transgene.

[0234] The loss of function mutation may be a deletion or insertion (“indels”) with reference the wild type Glyma.01G239600, Glyma.01G228700, Glyma.10G010500.1, Glyma.11 G010500, Glyma.13G173500, Glyma.14G005700, Glyma.17G064400, Glyma.16G149300, Glyma.17G036400, Glyma.17G036300, Glyma.19g135000, Glyma.11g011500, Glyma.02g005600, Glyma.17g030400 and Glyma19g030500 allele sequence (SEQ ID NO: 1, 220, 454, 674, 1014, 1305, 1491, 1798, 2090, 2200, 2296, 2630, 2810, 2973 and 3043, respectively). The deletion may comprise 1-20 or more nucleotides, for example 1, 2, 3, 4, 5, 6, 7, 8, 9, 10, 1, 12, 13, 14, 15, 16, 17, 18 or 20 nucleotides or more in one or more strand. The insertion may comprise 1-20 or more nucleotides, for example 1, 2, 3, 4, 5, 6, 7, 8, 9, 10, 1, 12, 13, 14, 15, 16, 17, 18 or 20 or more nucleotides in one or more strand.

[0235] The plant of the invention includes plants wherein the plant is heterozygous for the each of the mutations. In a preferred embodiment however, the plant is homozygous for the mutations. Progeny that is also homozygous can be generated from these plants according to methods known in the art.

[0236] It is further within the scope that variants (homologs, paralogs or orthologues) of a particular nucleotide or amino acid sequence according to the various aspects of the invention will have at least about 50%-99%, for example at least 75%, for example at least 85%, 86%, 87%, 88%, 89%, 90%, 92%, 94%, 95%, 96%, 97%, 98% or 99% or more sequence identity to that particular non-variant nucleotide sequence of the allele as shown in SEQ ID NO: SEQ ID NO: 1, 220, 454, 674, 1014, 1305, 1491, 1798, 2090, 2200, 2296, 2630, 2810, 2973 and 3043, or amino acid sequence as shown in SEQ ID NO: 3, 222, 456, 676, 1016, 1307, 1493, 1800, 2092, 2202, 2298, 2632, 2812, 2975 and 3045. Sequence alignment programs to determine sequence identity are well known in the art.

[0237] Also, the various aspects of the invention encompass not only a nucleic acid or amino acid sequence encoding Glyma.01G239600, Glyma.01G228700, Glyma.10G010500.1, Glyma.11G010500, Glyma.13G173500, Glyma.14G005700, Glyma.17G064400, Glyma.16G149300, Glyma.17G036400, Glyma.17G036300, Glyma.19g135000, Glyma.11g011500, Glyma.02g005600, Glyma.17g030400 and Glyma19g030500, but also fragments thereof. By “fragment” is intended a portion of the nucleotide sequence or a portion of the amino acid sequence and hence of the protein encoded thereby. Fragments of a nucleotide sequence may encode protein fragments that retain the biological activity of the native protein, in this case improved domestication trait.

[0238] According to further embodiments of the present invention, DNA introduction into the plant cells can be done by Agrobacterium infiltration, virus based plasmids for delivery of the genome editing molecules and mechanical insertion of DNA (PEG mediated DNA transformation, biolistics, etc.).

[0239] In addition, it is within the scope of the present invention that the Cas9 protein is directly inserted together with a gRNA (ribonucleoprotein—RNP's) in order to bypass the need for in vivo transcription and translation of the Cas9+gRNA plasmid in planta to achieve gene editing.

[0240] It is also possible to create a genome edited plant and use it as a rootstock. Then, the Cas protein and gRNA can be transported via the vasculature system to the top of the plant and create the genome editing event in the scion.

[0241] It is within the scope of the present invention that the usage of CRISPR/Cas system for the generation of Soybean plants with reduced phytoestrogen content, allows the modification of predetermined specific DNA sequences without introducing foreign DNA into the genome by GMO techniques. According to one embodiment of the present invention, this is achieved by combining the Cas nuclease (e.g. Cas9, Cpf1 and the like) with a predefined guide RNA molecule (gRNA). The gRNA is complementary to a specific DNA sequence targeted for editing in the plant genome and which guides the Cas nuclease to a specific nucleotide sequence. The predefined gene specific gRNA's are cloned into the same plasmid as the Cas gene and this plasmid is inserted into plant cells. Insertion of the aforementioned plasmid DNA can be done, but not limited to, using different delivery systems, biological and/or mechanical, e.g. Agrobacterium infiltration, virus based plasmids for delivery of the genome editing molecules and mechanical insertion of DNA (PEG mediated DNA transformation, biolistics, etc.).

[0242] It is further within the scope of the present invention that upon reaching the specific predetermined DNA sequence, the Cas9 nuclease cleaves both DNA strands to create double stranded breaks leaving blunt ends. This cleavage site is then repaired by the cellular non homologous end joining DNA repair mechanism resulting in insertions or deletions which eventually create a mutation at the cleavage site. For example, it is acknowledged that a deletion form of the mutation consists of at least 1 base pair deletion. As a result of this base pair deletion the gene coding sequence is disrupted and the translation of the encoded protein is compromised either by a premature stop codon or disruption of a functional or structural property of the protein. Thus DNA is cut by the Cas9 protein and re-assembled by the cell's DNA repair mechanism.

[0243] It is further within the scope that improved health properties in Soybean plants (e.g. reduced phytoestrogen level and/or enhanced protein concentration or content) is herein produced by generating gRNA with homology to a specific site of predetermined genes in the Soybean genome i.e. Glyma.01 G239600, Glyma.01 G228700, Glyma.10G010500.1, Glyma.11G010500, Glyma.13G173500, Glyma.14G005700, Glyma.17G064400, Glyma.16G149300, Glyma.17G036400, Glyma.17G036300, Glyma.19g135000, Glyma.11g011500, Glyma.02g005600, Glyma.17g030400 and Glyma19g030500 genes, sub cloning this gRNA into a plasmid containing the Cas9 gene, and insertion of the plasmid into the Soybean plant cells. In this way site specific mutations in the genes are generated thus effectively creating molecules with modulated expression, such as non-active molecules, resulting in reduction or elimination of phytoestrogens and increasing protein content of the genome edited Soybean plant.

[0244] According to one embodiment, the present invention provides a modified Soybean plant, plant part, or plant cell exhibiting reduced phytoestrogen content and/or increased protein content, wherein the modified Soybean plant, plant part, or plant cell comprises one or more gene editing derived mutations in at least one gene selected from Glyma.01G239600, Glyma.01G228700, Glyma.10G010500.1, Glyma.11 G010500, Glyma.13G173500, Glyma.14G005700, Glyma.17G064400, Glyma.16G149300, Glyma.17G036400, Glyma.17G036300, Glyma.19g135000, Glyma.11 g011500, Glyma.02g005600, Glyma.17g030400 and Glyma19g030500.

[0245] According to a further embodiment of the present invention, the modified Soybean plant, plant part, or plant cell as defined in any of the above is characterized by reduced phytoestrogen content and/or increased protein content, as compared to a Soybean plant absent of said one or more mutations.

[0246] According to a further embodiment of the present invention, the modified Soybean plant, plant part, or plant cell as defined in any of the above, wherein the plant, plant part, or plant cell is characterized by modulated or altered expression of said at least one gene as compared to a Soybean plant absent of said one or more mutations.

[0247] According to a further embodiment of the present invention, the modified Soybean plant, plant part, or plant cell as defined in any of the above, wherein the plant, plant part, or plant cell is characterized by reduced expression of said at least one gene as compared to a Soybean plant absent of said one or more mutations.

[0248] According to a further embodiment of the present invention, the modified Soybean plant, plant part, or plant cell as defined in any of the above, wherein the plant, plant part, or plant cell comprises one or more gene editing derived mutations in at least one gene selected from Glyma.01G239600, Glyma.01G228700, Glyma.10G010500.1, Glyma.11 G010500, Glyma.13G173500, Glyma.14G005700, Glyma.17G064400, Glyma.16G149300, Glyma.11g011500, Glyma.02g005600, Glyma.17g030400 and Glyma19g030500 conferring reduced phytoestrogen content to said plant, plant part, or plant cell.

[0249] According to a further embodiment of the present invention, the modified Soybean plant, plant part, or plant cell as defined in any of the above, wherein the plant, plant part, or plant cell comprises one or more gene editing derived mutations in at least one gene selected from Glyma.17G036400, Glyma.17G036300 and Glyma.19g135000 conferring increased protein content in the Soybean plant, plant part, or plant cell.

[0250] According to a further embodiment of the present invention, the modified Soybean plant, plant part, or plant cell as defined in any of the above, wherein the Glyma.01G239600, Glyma.01G228700, Glyma.10G010500.1, Glyma.11G010500, Glyma.13G173500, Glyma.14G005700, Glyma.17G064400, Glyma.16G149300, Glyma.17G036400, Glyma.17G036300, Glyma.19g135000, Glyma.11g011500, Glyma.02g005600, Glyma.17g030400 and Glyma19g030500 genes comprise a genomic sequence as set forth in SEQ ID NO: 1, 220, 454, 674, 1014, 1305, 1491, 1798, 2090, 2200, 2296, 2630, 2810, 2973 and 3043, respectively, or a functional variant thereof.

[0251] According to a further embodiment of the present invention, the modified Soybean plant, plant part, or plant cell as defined in any of the above, wherein the functional variant has at least 80% sequence identity to said SEQ ID NO: 1, 220, 454, 674, 1014, 1305, 1491, 1798, 2090, 2200, 2296, 2630, 2810, 2973 and 3043.

[0252] According to a further embodiment of the present invention, the modified Soybean plant, plant part, or plant cell as defined in any of the above, wherein the sequence of a target editing region within the at least one gene is selected from the group comprising a) a nucleic acid sequence encoding the polypeptide comprising a sequence selected from the group comprising SEQ ID NO: 3, 222, 456, 676, 1016, 1307, 1493, 1800, 2092, 2202, 2298, 2632, 2812, 2975 and 3045, b) a nucleic acid sequence comprising a sequence selected from the group comprising SEQ ID NO: 1, 220, 454, 674, 1014, 1305, 1491, 1798, 2090, 2200, 2296, 2630, 2810, 2973 and 3043, and c) a nucleic acid sequence having at least 80% sequence identity to at least 200 contiguous nucleotides of a nucleic acid sequence selected from the group comprising SEQ ID NO: 1, 220, 454, 674, 1014, 1305, 1491, 1798, 2090, 2200, 2296, 2630, 2810, 2973 and 3043.

[0253] According to a further embodiment of the present invention, the modified Soybean plant, plant part, or plant cell as defined in any of the above, wherein the one or more mutations is introduced in planta using targeted genome modification.

[0254] According to a further embodiment of the present invention, the modified Soybean plant, plant part, or plant cell as defined in any of the above, wherein the one or more mutations is introduced using CRISPR (Clustered Regularly Interspaced Short Palindromic Repeats) and CRISPR-associated (Cas) gene (CRISPR/Cas), Transcription activator-like effector nuclease (TALEN), Zinc Finger Nuclease (ZFN), meganuclease or any combination thereof.

[0255] According to a further embodiment of the present invention, the modified Soybean plant, plant part, or plant cell as defined in any of the above, wherein said Cas gene is selected from the group consisting of Cas3, Cas4, Cas5, Cas5e (or CasD), Cas6, Cas6e, Cas6f, Cas7, Cas8a1, Cas8a2, Cas8b, Cas8c, Cas9, Cas10, Cast10d, Cas12, Cas13, Cas14, CasX, CasY, CasF, CasG, CasH, Csy1, Csy2, Csy3, Cse1 (or CasA), Cse2 (or CasB), Cse3 (or CasE), Cse4 (or CasC), Csc1, Csc2, Csa5, Csn1, Csn2, Csm2, Csm3, Csm4, Csm5, Csm6, Cmr1, Cmr3, Cmr4, Cmr5, Cmr6, Cpf1, Csb1, Csb2, Csb3, Csx17, Csx14, Csx10, Csx16, CsaX, Csx3, Csz1, Csx15, Csf1, Csf2, Csf3, Csf4, and Cu1966 and any combination thereof.

[0256] According to a further embodiment of the present invention, the modified Soybean plant, plant part, or plant cell as defined in any of the above, wherein the at least one mutated gene is a CRISPR/Cas9-induced heritable mutated allele.

[0257] According to a further embodiment of the present invention, the modified Soybean plant, plant part, or plant cell as defined in any of the above, wherein the one or more mutations is selected from a silencing mutation, a knockdown mutation, a knockout mutation, a loss of function mutation, a downregulation mutation, an upregulation mutation or any combination thereof.

[0258] According to a further embodiment of the present invention, the modified Soybean plant, plant part, or plant cell as defined in any of the above, wherein the one or more mutations is in the coding region of said gene, a mutation in the regulatory region of said gene, or an epigenetic factor.

[0259] According to a further embodiment of the present invention, the modified Soybean plant, plant part, or plant cell as defined in any of the above, wherein said plant, plant part, or plant cell is homozygous for said at least one mutated gene.

[0260] According to a further embodiment of the present invention, the modified Soybean plant, plant part, or plant cell as defined in any of the above, wherein said plant, plant part, or plant cell is heterozygous for said at least one mutated gene.

[0261] According to a further embodiment of the present invention, the modified Soybean plant, plant part, or plant cell as defined in any of the above, wherein the one or more mutations is generated in planta via introduction of (a) Cas DNA and guide RNA (gRNA) sequence complementary to SEQ ID NO: 1, 220, 454, 674, 1014, 1305, 1491, 1798, 2090, 2200, 2296, 2630, 2810, 2973 and 3043, or (b) a ribonucleoprotein (RNP) complex comprising Cas protein and gRNA sequence complementary to SEQ ID NO: 1, 220, 454, 674, 1014, 1305, 1491, 1798, 2090, 2200, 2296, 2630, 2810, 2973 and 3043.

[0262] According to a further embodiment of the present invention, the modified Soybean plant, plant part, or plant cell as defined in any of the above, wherein said one or more mutations is generated in planta in said at least one Glyma.01G239600, Glyma.01G228700, Glyma.10G010500.1, Glyma.11G010500, Glyma.13G173500, Glyma.14G005700, Glyma.17G064400, Glyma.16G149300, Glyma.17G036400, Glyma.17G036300, Glyma.19g135000, Glyma.11g011500, Glyma.02g005600, Glyma.17g030400 and Glyma19g030500 genes via introduction of (a) Cas DNA and guide RNA (gRNA) sequence selected from the group consisting of a sequence comprising at least 85% sequence identity to at least one of SEQ ID NO: 4-219, SEQ ID NO: 223-453, SEQ ID NO: 457-673, SEQ ID NO: 677-1013, SEQ ID NO: 1017-1304, SEQ ID NO: 1308-1490, SEQ ID NO: 1494-1797, SEQ ID NO: 1801-2089, SEQ ID NO: 2093-2199, SEQ ID NO: 2203-2295, SEQ ID NO: 2299-2629, SEQ ID NO: 2633-2809, SEQ ID NO: 2813-2972, SEQ ID NO: 2976-3042 or SEQ ID NO: 3046-3268, respectively, and any combination thereof, or (b) a ribonucleoprotein (RNP) complex comprising Cas protein and gRNA sequence selected from the group consisting of a sequence comprising at least 85% sequence identity to at least one of SEQ ID NO: 4-219, SEQ ID NO: 223-453, SEQ ID NO: 457-673, SEQ ID NO: 677-1013, SEQ ID NO: 1017-1304, SEQ ID NO: 1308-1490, SEQ ID NO: 1494-1797, SEQ ID NO: 1801-2089, SEQ ID NO: 2093-2199, SEQ ID NO: 2203-2295, SEQ ID NO: 2299-2629, SEQ ID NO: 2633-2809, SEQ ID NO: 2813-2972, SEQ ID NO: 2976-3042 or SEQ ID NO: 3046-3268, respectively, and any combination thereof.

[0263] According to a further embodiment of the present invention, the modified Soybean plant, plant part, or plant cell as defined in any of the above, wherein said gRNA sequence comprises a 3′ Protospacer Adjacent Motif (PAM) selected from NGG, NNGRRT, NNNNGATT, NNAGAAW and NAAAAC.

[0264] According to a further embodiment of the present invention, the modified Soybean plant, plant part, or plant cell as defined in any of the above, wherein the plant, plant part, or plant cell does not comprise a transgene.

[0265] According to a further embodiment of the present invention, the modified Soybean plant, plant part, or plant cell as defined in any of the above, wherein the plant part is a seed, tissue culture of regenerable cells, protoplasts, callus or pollen.

[0266] According to a further embodiment of the present invention, the modified Soybean plant, plant part, or plant cell as defined in any of the above, wherein the plant, plant part, or plant cell has a content of phytoestrogen that is reduced by about 10%, about 20%, about 30%, about 50%, about 60%, about 70%, about 80%, or about 90% compared to the content of phytoestrogen in a Soybean plant, plant part, or plant cell absent of said one or more mutations.

[0267] According to a further embodiment of the present invention, the modified Soybean plant, plant part, or plant cell as defined in any of the above, wherein the phytoestrogen is selected from isoflavone and/or Coumestrol.

[0268] According to a further embodiment of the present invention, the modified Soybean plant, plant part, or plant cell as defined in any of the above, wherein the plant, plant part, or plant cell has a protein content that is elevated by about 10%, about 20%, about 30%, about 50%, about 60%, about 70%, about 80%, or about 90% compared to the protein content in a Soybean plant, plant part, or plant cell absent of said one or more mutations.

[0269] It is further within the scope of the present invention to provide Soybean seed, pollen, plant parts or progeny of the modified Soybean plant as defined in any of the above, wherein said seed, pollen, plant parts or progeny comprises said one or more gene editing derived mutations in at least one gene selected from Glyma.01G239600, Glyma.01G228700, Glyma.10G010500.1, Glyma.11G010500, Glyma.13G173500, Glyma.14G005700, Glyma.17G064400, Glyma.16G149300, Glyma.17G036400, Glyma.17G036300, Glyma.19g135000, Glyma.11g011500, Glyma.02g005600, Glyma.17g030400 and Glyma19g030500.

[0270] It is further within the scope of the present invention to provide food and non-food products incorporating the modified Soybean plant, plant part or plant cell as defined in any of the above.

[0271] It is further within the scope of the present invention to provide food and non-food products incorporating a seed of a Soybean plant as defined in any of the above.

[0272] It is further within the scope of the present invention to disclose a method for producing a modified Soybean plant, plant part, or plant cell exhibiting reduced phytoestrogen content and/or increased protein content using targeted genome modification, comprising steps of: (a) identifying a gene involved in phytoestrogen synthesis and/or increased protein content of a Soybean plant species; (b) synthesizing or designing a gRNA expression cassette corresponding to a target editing region along the Soybean genome, within the identified gene locus; (c) transforming said Soybean plant, plant part, or plant cell with CRISPR/Cas9 system; (d) screening the genome of said transformed plant, plant part, or plant cell for induced targeted mutation, e.g. loss of function mutation in the identified gene involved in phytoestrogen synthesis and/or increased protein content; (e) selecting said Soybean plant, plant part, or plant cell expressing desired one or more mutations in the editing target region, said mutations confer reduced phytoestrogen content and/or increased protein content; and (f) optionally, regenerating a plant from said transformed plant, plant part, or plant cell plant cell nucleus, or plant tissue and optionally screening said regenerated plants for a Soybean plant, with decreased phytoestrogen content and/or increased protein content.

[0273] It is further within the scope of the present invention to disclose the method as defined in any of the above, wherein the gRNA and its corresponding PAM is complementary to a sequence of a gene selected from a group comprising at least one of Glyma.01G239600, Glyma.01G228700, Glyma.10G010500.1, Glyma.11 G010500, Glyma.13G173500, Glyma.14G005700, Glyma.17G064400, Glyma.16G149300, Glyma.17G036400, Glyma.17G036300, Glyma.19g135000, Glyma.11g011500, Glyma.02g005600, Glyma.17g030400 and Glyma19g030500.

[0274] It is further within the scope of the present invention to disclose a method for producing a modified Soybean plant, plant part, or plant cell exhibiting reduced phytoestrogen content and/or increased protein content using targeted genome modification comprising introducing into the genome of the plant, plant part, or plant cell one or more mutations in at least one gene selected from Glyma.01G239600, Glyma.01G228700, Glyma.10G010500.1, Glyma.11G010500, Glyma.13G173500, Glyma.14G005700, Glyma.17G064400, Glyma.16G149300, Glyma.17G036400, Glyma.17G036300, Glyma.19g135000, Glyma.11g011500, Glyma.02g005600, Glyma.17g030400 and Glyma19g030500.

[0275] It is further within the scope of the present invention to disclose the method as defined in any of the above, wherein the plant, plant part, or plant cell is characterized by reduced phytoestrogen content and/or increased protein content, as compared to a Soybean plant absent of said one or more mutations.

[0276] It is further within the scope of the present invention to disclose the method as defined in any of the above, wherein the plant, plant part, or plant cell is characterized by modulated or altered expression of said at least one gene as compared to a Soybean plant absent of said one or more mutations.

[0277] It is further within the scope of the present invention to disclose the method as defined in any of the above, wherein the plant, plant part, or plant cell is characterized by reduced expression of said at least one gene as compared to a Soybean plant absent of said one or more mutations.

[0278] It is further within the scope of the present invention to disclose the method as defined in any of the above, wherein the plant, plant part, or plant cell comprises one or more gene editing derived mutations in at least one gene selected from Glyma.01G239600, Glyma.01G228700, Glyma.10G010500.1, Glyma.11 G010500, Glyma.13G173500, Glyma.14G005700, Glyma.17G064400, Glyma.16G149300, Glyma.11g011500, Glyma.02g005600, Glyma.17g030400 and Glyma19g030500 conferring reduced phytoestrogen content to said plant, plant part, or plant cell.

[0279] It is further within the scope of the present invention to disclose the method as defined in any of the above, wherein the plant, plant part, or plant cell comprises one or more gene editing derived mutations in at least one gene selected from Glyma.17G036400, Glyma.17G036300 and Glyma.19g135000 conferring increased protein content in the Soybean plant, plant part, or plant cell.

[0280] It is further within the scope of the present invention to disclose the method as defined in any of the above, wherein the Glyma.01G239600, Glyma.01G228700, Glyma.10G010500.1, Glyma.11G010500, Glyma.13G173500, Glyma.14G005700, Glyma.17G064400, Glyma.16G149300, Glyma.17G036400, Glyma.17G036300, Glyma.19g135000, Glyma.11g011500, Glyma.02g005600, Glyma.17g030400 and Glyma19g030500 genes comprise a genomic sequence as set forth in SEQ ID NO: 1, 220, 454, 674, 1014, 1305, 1491, 1798, 2090, 2200, 2296, 2630, 2810, 2973 and 3043, respectively, or a functional variant thereof.

[0281] It is further within the scope of the present invention to disclose the method as defined in any of the above, wherein the functional variant has at least 80% sequence identity to said SEQ ID NO: 1, 220, 454, 674, 1014, 1305, 1491, 1798, 2090, 2200, 2296, 2630, 2810, 2973 and 3043.

[0282] It is further within the scope of the present invention to disclose the method as defined in any of the above, wherein the sequence of a target editing region within the at least one gene is selected from the group comprising a) a nucleic acid sequence encoding the polypeptide comprising a sequence selected from the group comprising SEQ ID NO: 3, 222, 456, 676, 1016, 1307, 1493, 1800, 2092, 2202, 2298, 2632, 2812, 2975 and 3045, b) a nucleic acid sequence comprising a sequence selected from the group comprising SEQ ID NO: 1, 220, 454, 674, 1014, 1305, 1491, 1798, 2090, 2200, 2296, 2630, 2810, 2973 and 3043, and c) a nucleic acid sequence having at least 80% sequence identity to at least 200 contiguous nucleotides of a nucleic acid sequence selected from the group comprising SEQ ID NO: 1, 220, 454, 674, 1014, 1305, 1491, 1798, 2090, 2200, 2296, 2630, 2810, 2973 and 3043.

[0283] It is further within the scope of the present invention to disclose the method as defined in any of the above, wherein the one or more mutations is introduced in planta using targeted genome modification.

[0284] It is further within the scope of the present invention to disclose the method as defined in any of the above, wherein the one or more mutations is introduced using CRISPR (Clustered Regularly Interspaced Short Palindromic Repeats) and CRISPR-associated (Cas) gene (CRISPR/Cas), Transcription activator-like effector nuclease (TALEN), Zinc Finger Nuclease (ZFN), meganuclease or any combination thereof.

[0285] It is further within the scope of the present invention to disclose the method as defined in any of the above, wherein said Cas gene is selected from the group consisting of Cas3, Cas4, Cas5, Cas5e (or CasD), Cas6, Cas6e, Cas6f, Cas7, Cas8a1, Cas8a2, Cas8b, Cas8c, Cas9, Cas10, Cast10d, Cas12, Cas13, Cas14, CasX, CasY, CasF, CasG, CasH, Csy1, Csy2, Csy3, Cse1 (or CasA), Cse2 (or CasB), Cse3 (or CasE), Cse4 (or CasC), Csc1, Csc2, Csa5, Csn1, Csn2, Csm2, Csm3, Csm4, Csm5, Csm6, Cmr1, Cmr3, Cmr4, Cmr5, Cmr6, Cpf1, Csb1, Csb2, Csb3, Csx17, Csx14, Csx10, Csx16, CsaX, Csx3, Csz1, Csx15, Csf1, Csf2, Csf3, Csf4, and Cu1966 and any combination thereof.

[0286] It is further within the scope of the present invention to disclose the method as defined in any of the above, wherein the at least one mutated gene is a CRISPR/Cas9-induced heritable mutated allele.

[0287] It is further within the scope of the present invention to disclose the method as defined in any of the above, wherein the one or more mutations is selected from a silencing mutation, a knockdown mutation, a knockout mutation, a loss of function mutation, a downregulation mutation, an upregulation mutation or any combination thereof.

[0288] It is further within the scope of the present invention to disclose the method as defined in any of the above, wherein the one or more mutations is in the coding region of said gene, a mutation in the regulatory region of said gene, or an epigenetic factor.

[0289] It is further within the scope of the present invention to disclose the method as defined in any of the above, wherein said plant, plant part, or plant cell is homozygous for said at least one mutated gene.

[0290] It is further within the scope of the present invention to disclose the method as defined in any of the above, wherein said plant, plant part, or plant cell is heterozygous for said at least one mutated gene.

[0291] It is further within the scope of the present invention to disclose the method as defined in any of the above, wherein the one or more mutations is generated in planta via introduction of (a) Cas DNA and guide RNA (gRNA) sequence complementary to SEQ ID NO: 1, 220, 454, 674, 1014, 1305, 1491, 1798, 2090, 2200, 2296, 2630, 2810, 2973 and 3043, or (b) a ribonucleoprotein (RNP) complex comprising Cas protein and gRNA sequence complementary to SEQ ID NO: 1, 220, 454, 674, 1014, 1305, 1491, 1798, 2090, 2200, 2296, 2630, 2810, 2973 and 3043.

[0292] It is further within the scope of the present invention to disclose the method as defined in any of the above, wherein said one or more mutations is generated in planta in said at least one Glyma.01G239600, Glyma.01G228700, Glyma.10G010500.1, Glyma.11G010500, Glyma.13G173500, Glyma.14G005700, Glyma.17G064400, Glyma.16G149300, Glyma.17G036400, Glyma.17G036300, Glyma.19g135000, Glyma.11g011500, Glyma.02g005600, Glyma.17g030400 and Glyma19g030500 genes via introduction of (a) Cas DNA and guide RNA (gRNA) sequence selected from the group consisting of a sequence comprising at least 85% sequence identity to at least one of SEQ ID NO: 4-219, SEQ ID NO: 223-453, SEQ ID NO: 457-673, SEQ ID NO: 677-1013, SEQ ID NO: 1017-1304, SEQ ID NO: 1308-1490, SEQ ID NO: 1494-1797, SEQ ID NO: 1801-2089, SEQ ID NO: 2093-2199, SEQ ID NO: 2203-2295, SEQ ID NO: 2299-2629, SEQ ID NO: 2633-2809, SEQ ID NO: 2813-2972, SEQ ID NO: 2976-3042 or SEQ ID NO: 3046-3268, respectively, or (b) a ribonucleoprotein (RNP) complex comprising Cas protein and gRNA sequence selected from the group consisting of a sequence comprising at least 85% sequence identity to at least one of SEQ ID NO: 4-219, SEQ ID NO: 223-453, SEQ ID NO: 457-673, SEQ ID NO: 677-1013, SEQ ID NO: 1017-1304, SEQ ID NO: 1308-1490, SEQ ID NO: 1494-1797, SEQ ID NO: 1801-2089, SEQ ID NO: 2093-2199, SEQ ID NO: 2203-2295, SEQ ID NO: 2299-2629, SEQ ID NO: 2633-2809, SEQ ID NO: 2813-2972, SEQ ID NO: 2976-3042 or SEQ ID NO: 3046-3268, respectively.

[0293] It is further within the scope of the present invention to disclose the method as defined in any of the above, wherein said gRNA sequence comprises a 3′ Protospacer Adjacent Motif (PAM) selected from NGG, NNGRRT, NNNNGATT, NNAGAAW and NAAAAC.

[0294] It is further within the scope of the present invention to disclose the method as defined in any of the above, wherein the transformation is carried out to deliver an expression cassette comprising a) a selection marker, b) a nucleotide sequence encoding one or more gRNA molecules comprising a sequence selected from the group consisting of a sequence comprising at least 85% sequence identity to at least one of SEQ ID NO: 4-219, SEQ ID NO: 223-453, SEQ ID NO: 457-673, SEQ ID NO: 677-1013, SEQ ID NO: 1017-1304, SEQ ID NO: 1308-1490, SEQ ID NO: 1494-1797, SEQ ID NO: 1801-2089, SEQ ID NO: 2093-2199, SEQ ID NO: 2203-2295, SEQ ID NO: 2299-2629, SEQ ID NO: 2633-2809, SEQ ID NO: 2813-2972, SEQ ID NO: 2976-3042 or SEQ ID NO: 3046-3268, and c) a nucleotide sequence encoding a Cas molecule.

[0295] It is further within the scope of the present invention to disclose the method as defined in any of the above, wherein the method comprises administering to the Soybean plant, plant part, or plant cell a nucleic acid composition comprising: a) a first nucleotide sequence encoding a gRNA molecule, and b) a second nucleotide sequence encoding the Cas molecule.

[0296] It is further within the scope of the present invention to disclose the method as defined in any of the above, wherein the CRISPR/Cas system is delivered to the cell by a plant virus.

[0297] It is further within the scope of the present invention to disclose the method as defined in any of the above, wherein the method comprises steps of (a) introducing into a Soybean plant or plant part or cell thereof (i) at least one RNA-guided endonuclease comprising at least one nuclear localization signal or nucleic acid encoding at least one RNA-guided endonuclease comprising at least one nuclear localization signal, (ii) at least one guide RNA (gRNA) or DNA encoding at least one gRNA, and, optionally, (iii) at least one donor polynucleotide; and (b) culturing the Soybean plant or plant part or cell thereof such that each gRNA directs an RNA-guided endonuclease to a target site in the chromosomal sequence where the RNA-guided endonuclease introduces a double-stranded break in the target site, and the double-stranded break is repaired by a DNA repair process such that the chromosomal sequence is modified, wherein the target site is located in at least one gene selected from Glyma.01G239600, Glyma.01G228700, Glyma.10G010500.1, Glyma.11G010500, Glyma.13G173500, Glyma.14G005700, Glyma.17G064400, Glyma.16G149300, Glyma.17G036400, Glyma.17G036300, Glyma.19g135000, Glyma.11g011500, Glyma.02g005600, Glyma.17g030400 and Glyma19g030500 and the chromosomal modification interrupts or interferes with transcription and/or translation of the at least one gene.

[0298] It is further within the scope of the present invention to disclose the method as defined in any of the above, wherein the RNA-guided endonuclease is derived from a clustered regularly interspersed short palindromic repeats (CRISPR)/CRISPR-associated (Cas) system.

[0299] It is further within the scope of the present invention to disclose the method as defined in any of the above, wherein introduction of a genome modification does not insert exogenous genetic material, and produces a non-naturally occurring or modified Soybean plant, plant part or cell thereof.

[0300] It is further within the scope of the present invention to disclose the method as defined in any of the above, further comprises steps of (a) identifying at least one locus within a DNA sequence of a Soybean plant or a cell thereof selected from Glyma.01G239600, Glyma.01G228700, Glyma.10G010500.1, Glyma.11 G010500, Glyma.13G173500, Glyma.14G005700, Glyma.17G064400, Glyma.16G149300, Glyma.17G036400, Glyma.17G036300, Glyma.19g135000, Glyma.11g011500, Glyma.02g005600, Glyma.17g030400 and Glyma19g030500 genes; (b) identifying at least one custom endonuclease recognition sequence within the at least one locus of the gene; and (c) identifying the Soybean plant, a cell thereof, or a progeny cell thereof as comprising a modification in the loci of the at least one gene, said modification confers modulated or altered expression, e.g. silencing, of at least one gene selected from Glyma.01G239600, Glyma.01G228700, Glyma.10G010500.1, Glyma.11 G010500, Glyma.13G173500, Glyma.14G005700, Glyma.17G064400, Glyma.16G149300, Glyma.17G036400, Glyma.17G036300, Glyma.19g135000, Glyma.11g011500, Glyma.02g005600, Glyma.17g030400 and Glyma19g030500.

[0301] It is further within the scope of the present invention to disclose the method as defined in any of the above, wherein the plant, plant part, or plant cell does not comprise a transgene.

[0302] It is further within the scope of the present invention to disclose the method as defined in any of the above, wherein the plant part is a seed, tissue culture of regenerable cells, protoplasts, callus or pollen.

[0303] It is further within the scope of the present invention to disclose the method as defined in any of the above, wherein the plant, plant part, or plant cell has a content of phytoestrogen that is reduced by about 10%, about 20%, about 30%, about 50%, about 60%, about 70%, about 80%, or about 90% compared to the content of phytoestrogen in a Soybean plant, plant part, or plant cell absent of said one or more mutations.

[0304] It is further within the scope of the present invention to disclose the method as defined in any of the above, wherein the phytoestrogen is selected from isoflavone and/or Coumestrol.

[0305] It is further within the scope of the present invention to disclose the method as defined in any of the above, wherein the plant, plant part, or plant cell has a protein content that is elevated by about 10%, about 20%, about 30%, about 50%, about 60%, about 70%, about 80%, or about 90% compared to the protein content in a Soybean plant, plant part, or plant cell absent of said one or more mutations.

[0306] It is further within the scope of the present invention to disclose the method as defined in any of the above, wherein the method further comprises steps of analyzing the Soybean plants or progeny thereof, plant part, or plant cell by a) isolating genomic DNA from the mutated plant material or its progeny; and b) amplifying segments of a gene involved in phytoestrogen synthesis and/or a gene associated with protein accumulation such as fatty acid transport or sugar metabolism, in the isolated genomic DNA, using primers specific to at least one of Glyma.01G239600, Glyma.01G228700, Glyma.10G010500.1, Glyma.11G010500, Glyma.13G173500, Glyma.14G005700, Glyma.17G064400, Glyma.16G149300, Glyma.17G036400, Glyma.17G036300, Glyma.19g135000, Glyma.11g011500, Glyma.02g005600, Glyma.17g030400 and Glyma19g030500 genes or to the DNA sequences adjacent to the at least one gene.

[0307] According to a further embodiment, the present invention provides a modified Soybean seed, pollen, plant parts or progeny with reduced phytoestrogen content and/or increased protein content, produced by the method as defined in any of the above, wherein said seed, pollen, plant parts or progeny comprises said one or more gene editing derived mutations in at least one gene selected from Glyma.01G239600, Glyma.01 G228700, Glyma.10G010500.1, Glyma.11 G010500, Glyma.13G173500, Glyma.14G005700, Glyma.17G064400, Glyma.16G149300, Glyma.17G036400, Glyma.17G036300, Glyma.19g135000, Glyma.11g011500, Glyma.02g005600, Glyma.17g030400 and Glyma19g030500.

[0308] It is further within the scope of the present invention to disclose a method for reducing phytoestrogen content and/or increasing protein content in a Soybean plant, plant part or plant cell, using targeted genome modification, comprising introducing into the genome of the plant, plant part, or plant cell one or more mutations in at least one gene selected from Glyma.01G239600, Glyma.01G228700, Glyma.10G010500.1, Glyma.11 G010500, Glyma.13G173500, Glyma.14G005700, Glyma.17G064400, Glyma.16G149300, Glyma.17G036400, Glyma.17G036300, Glyma.19g135000, Glyma.11g011500, Glyma.02g005600, Glyma.17g030400 and Glyma19g030500.

[0309] It is also within the scope of the present invention to disclose a method for increasing Soybean yield using targeted genome modification, comprising introducing into the genome of the Soybean plant, plant part, or plant cell one or more mutations in at least one gene selected from Glyma.01G239600, Glyma.01G228700, Glyma.10G010500.1, Glyma.11G010500, Glyma.13G173500, Glyma.14G005700, Glyma.17G064400, Glyma.16G149300, Glyma.17G036400, Glyma.17G036300, Glyma.19g135000, Glyma.11g011500, Glyma.02g005600, Glyma.17g030400 and Glyma19g030500.

[0310] It is further within the scope of the present invention to disclose the method as defined in any of the above, wherein the plant part is selected from the group consisting of seeds, pollen, plant cells, or plant tissue.

[0311] It is further within the scope of the present invention to disclose the method as defined in any of the above, wherein the plant, plant part, or plant cell comprises one or more gene editing derived mutations in at least one gene selected from Glyma.01G239600, Glyma.01G228700, Glyma.10G010500.1, Glyma.11 G010500, Glyma.13G173500, Glyma.14G005700, Glyma.17G064400, Glyma.16G149300, Glyma.11g011500, Glyma.02g005600, Glyma.17g030400 and Glyma19g030500 conferring reduced phytoestrogen content to said plant, plant part, or plant cell.

[0312] It is further within the scope of the present invention to disclose the method as defined in any of the above, wherein the plant, plant part, or plant cell comprises one or more gene editing derived mutations in at least one gene selected from Glyma.17G036400, Glyma.17G036300 and Glyma.19g135000 conferring increased protein content in the Soybean plant, plant part, or plant cell.

[0313] It is further within the scope of the present invention to disclose the method as defined in any of the above, wherein the Glyma.01G239600, Glyma.01G228700, Glyma.10G010500.1, Glyma.11G010500, Glyma.13G173500, Glyma.14G005700, Glyma.17G064400, Glyma.16G149300, Glyma.17G036400, Glyma.17G036300, Glyma.19g135000, Glyma.11g011500, Glyma.02g005600, Glyma.17g030400 and Glyma19g030500 genes comprise a genomic sequence as set forth in SEQ ID NO: 1, 220, 454, 674, 1014, 1305, 1491, 1798, 2090, 2200, 2296, 2630, 2810, 2973 and 3043, respectively, or a functional variant thereof.

[0314] It is further within the scope of the present invention to disclose the method as defined in any of the above, wherein the functional variant has at least 80% sequence identity to said SEQ ID NO: 1, 220, 454, 674, 1014, 1305, 1491, 1798, 2090, 2200, 2296, 2630, 2810, 2973 and 3043.

[0315] It is further within the scope of the present invention to disclose the method as defined in any of the above, wherein said one or more mutations is generated in planta in said at least one Glyma.01G239600, Glyma.01G228700, Glyma.10G010500.1, Glyma.11G010500, Glyma.13G173500, Glyma.14G005700, Glyma.17G064400, Glyma.16G149300, Glyma.17G036400, Glyma.17G036300, Glyma.19g135000, Glyma.11g011500, Glyma.02g005600, Glyma.17g030400 and Glyma19g030500 genes via introduction of (a) Cas DNA and guide RNA (gRNA) sequence selected from the group consisting of a sequence comprising at least 85% sequence identity to at least one of SEQ ID NO: 4-219, SEQ ID NO: 223-453, SEQ ID NO: 457-673, SEQ ID NO: 677-1013, SEQ ID NO: 1017-1304, SEQ ID NO: 1308-1490, SEQ ID NO: 1494-1797, SEQ ID NO: 1801-2089, SEQ ID NO: 2093-2199, SEQ ID NO: 2203-2295, SEQ ID NO: 2299-2629, SEQ ID NO: 2633-2809, SEQ ID NO: 2813-2972, SEQ ID NO: 2976-3042 or SEQ ID NO: 3046-3268, respectively, or (b) a ribonucleoprotein (RNP) complex comprising Cas protein and gRNA sequence selected from the group consisting of a sequence comprising at least 85% sequence identity to at least one of SEQ ID NO: 4-219, SEQ ID NO: 223-453, SEQ ID NO: 457-673, SEQ ID NO: 677-1013, SEQ ID NO: 1017-1304, SEQ ID NO: 1308-1490, SEQ ID NO: 1494-1797, SEQ ID NO: 1801-2089, SEQ ID NO: 2093-2199, SEQ ID NO: 2203-2295, SEQ ID NO: 2299-2629, SEQ ID NO: 2633-2809, SEQ ID NO: 2813-2972, SEQ ID NO: 2976-3042 or SEQ ID NO: 3046-3268, respectively.

[0316] According to another embodiment, the present invention provides a construct comprising or encoding (a) a nucleotide sequence encoding a Cas molecule and one or more gRNA molecules comprising a sequence selected from the group consisting of a sequence comprising at least 85% sequence identity to at least one of SEQ ID NO: 4-219, SEQ ID NO: 223-453, SEQ ID NO: 457-673, SEQ ID NO: 677-1013, SEQ ID NO: 1017-1304, SEQ ID NO: 1308-1490, SEQ ID NO: 1494-1797, SEQ ID NO: 1801-2089, SEQ ID NO: 2093-2199, SEQ ID NO: 2203-2295, SEQ ID NO: 2299-2629, SEQ ID NO: 2633-2809, SEQ ID NO: 2813-2972, SEQ ID NO: 2976-3042, SEQ ID NO: 3046-3268, and any combination thereof, or (b) a ribonucleoprotein (RNP) complex comprising Cas protein and one or more gRNA molecules comprising a sequence comprising at least 85% sequence identity to at least one of SEQ ID NO: 4-219, SEQ ID NO: 223-453, SEQ ID NO: 457-673, SEQ ID NO: 677-1013, SEQ ID NO: 1017-1304, SEQ ID NO: 1308-1490, SEQ ID NO: 1494-1797, SEQ ID NO: 1801-2089, SEQ ID NO: 2093-2199, SEQ ID NO: 2203-2295, SEQ ID NO: 2299-2629, SEQ ID NO: 2633-2809, SEQ ID NO: 2813-2972, SEQ ID NO: 2976-3042 or SEQ ID NO: 3046-3268, and any combination thereof.

[0317] It is also within the scope of the present invention to disclose a method of modifying the phytoestrogen content and/or protein content of a Soybean plant, plant part, or plant cell, comprising introducing into a Soybean plant, plant part, or plant cell the construct as defined above.

[0318] It is also within the scope of the present invention to disclose an isolated polynucleotide sequence comprising at least 80% sequence identity to a polynucleotide sequence selected from the group consisting of SEQ ID NO: 1, 2, 220, 221, 454, 455, 674, 675, 1014, 1015, 1305, 1306, 1491, 1492, 1798, 1799, 2090, 2091, 2200, 2201, 2296, 2297, 2630, 2631, 2810, 2811, 2973, 2974, 3043 and 3044.

[0319] It is also within the scope of the present invention to disclose an isolated polypeptide sequence comprising at least 80% sequence identity to SEQ ID NO: 3, 222, 456, 676, 1016, 1307, 1493, 1800, 2092, 2202, 2298, 2632, 2812, 2975 and 3045.

[0320] According to a further embodiment, the present invention discloses a use of a nucleic acid sequence comprising at least 80% sequence identity to a sequence as set forth in at least one of SEQ ID NO: 4-219, SEQ ID NO: 223-453, SEQ ID NO: 457-673, SEQ ID NO: 677-1013, SEQ ID NO: 1017-1304, SEQ ID NO: 1308-1490, SEQ ID NO: 1494-1797, SEQ ID NO: 1801-2089, SEQ ID NO: 2633-2809, SEQ ID NO: 2813-2972, SEQ ID NO: 2976-3042 or SEQ ID NO: 3046-3268 and any combination thereof for targeted gene editing of at least one Soybean gene selected from Glyma.01G239600, Glyma.01G228700, Glyma.10G010500.1, Glyma.11G010500, Glyma.13G173500, Glyma.14G005700, Glyma.17G064400, Glyma.16G149300, Glyma.11g011500, Glyma.02g005600, Glyma.17g030400 and Glyma19g030500, respectively, said gene editing confers reduced phytoestrogen content in a Soybean plant, plant part or plant cell.

[0321] According to a further embodiment, the present invention discloses a use of a nucleic acid sequence comprising at least 80% sequence identity to a sequence as set forth in at least one of SEQ ID NO: 2093-2199, SEQ ID NO: 2203-2295, SEQ ID NO: 2299-2629 and any combination thereof, for targeted gene editing of at least one Soybean gene selected from Glyma.17G036400, Glyma.17G036300, Glyma.19g135000, respectively, said gene editing confers increased protein content in a Soybean plant, plant part or plant cell.

1. A modified Soybean plant, plant part, or plant cell, wherein the modified Soybean plant, plant part, or plant cell comprises one or more gene editing derived mutations in at least one gene selected from Glyma.01G239600, Glyma.01G228700, Glyma.10G010500.1, Glyma.11G010500, Glyma.13G173500, Glyma.14G005700, Glyma.17G064400, Glyma.16G149300, Glyma.11g011500, Glyma.02g005600, Glyma.17g030400 and Glyma19g030500, conferring reduced phytoestrogen content to said plant, plant part, or plant cell, and/or one or more gene editing derived mutations in at least one gene selected from Glyma.17G036400, Glyma.17G036300 and Glyma.19g135000, conferring increased protein content to the Soybean plant, plant part, or plant cell.

2. The modified Soybean plant, plant part, or plant cell according to claim 1, wherein the plant, plant part, or plant cell is characterized by at least one of:
a. reduced phytoestrogen content and/or increased protein content, as compared to a Soybean plant absent of said one or more mutations;
b. modulated or altered expression of said at least one gene as compared to a Soybean plant absent of said one or more mutations; and
c. reduced expression of said at least one gene as compared to a Soybean plant absent of said one or more mutations.

3-6. (canceled)

7. The modified Soybean plant, plant part, or plant cell according to claim 1, wherein the Glyma.01G239600, Glyma.01G228700, Glyma.10G010500.1, Glyma.11G010500, Glyma.13 G173500, Glyma.14G005700, Glyma.17G064400, Glyma.16G149300, Glyma.17G036400, Glyma.17G036300, Glyma.19g135000, Glyma.11g011500, Glyma.02g005600, Glyma.17g030400 and Glyma19g030500 genes comprise a genomic sequence having at least 80% sequence identity to SEQ ID NO: 1, 220, 454, 674, 1014, 1305, 1491, 1798, 2090, 2200, 2296, 2630, 2810, 2973 and 3043, respectively.

8. (canceled)

9. The modified Soybean plant, plant part, or plant cell according to claim 1, wherein the sequence of a target editing region within the at least one gene is selected from the group comprising a) a nucleic acid sequence encoding the polypeptide comprising a sequence selected from the group comprising SEQ ID NO: 3, 222, 456, 676, 1016, 1307, 1493, 1800, 2092, 2202, 2298, 2632, 2812, 2975 and 3045, b) a nucleic acid sequence comprising a sequence selected from the group comprising SEQ ID NO: 1, 220, 454, 674, 1014, 1305, 1491, 1798, 2090, 2200, 2296, 2630, 2810, 2973 and 3043, and c) a nucleic acid sequence having at least 80% sequence identity to at least 200 contiguous nucleotides of a nucleic acid sequence selected from the group comprising SEQ ID NO: 1, 220, 454, 674, 1014, 1305, 1491, 1798, 2090, 2200, 2296, 2630, 2810, 2973 and 3043.

10-18. (canceled)

19. The modified Soybean plant, plant part, or plant cell according to claim 1, wherein said one or more mutations is generated in planta in said at least one Glyma.01G239600, Glyma.01G228700, Glyma.10G010500.1, Glyma.11G010500, Glyma.13G173500, Glyma.14G005700, Glyma.17G064400, Glyma.16G149300, Glyma.17G036400, Glyma.17G036300, Glyma.19g135000, Glyma.11g011500, Glyma.02g005600, Glyma.17g030400 and Glyma19g030500 genes via introduction of (a) Cas DNA and guide RNA (gRNA) sequence selected from the group consisting of a sequence comprising at least 85% sequence identity to at least one of SEQ ID NO: 4-219, SEQ ID NO: 223-453, SEQ ID NO: 457-673, SEQ ID NO: 677-1013, SEQ ID NO: 1017-1304, SEQ ID NO: 1308-1490, SEQ ID NO: 1494-1797, SEQ ID NO: 1801-2089, SEQ ID NO: 2093-2199, SEQ ID NO: 2203-2295, SEQ ID NO: 2299-2629, SEQ ID NO: 2633-2809, SEQ ID NO: 2813-2972, SEQ ID NO: 2976-3042 or SEQ ID NO: 3046-3268, respectively, and any combination thereof, or (b) a ribonucleoprotein (RNP) complex comprising Cas protein and gRNA sequence selected from the group consisting of a sequence comprising at least 85% sequence identity to at least one of SEQ ID NO: 4-219, SEQ ID NO: 223-453, SEQ ID NO: 457-673, SEQ ID NO: 677-1013, SEQ ID NO: 1017-1304, SEQ ID NO: 1308-1490, SEQ ID NO: 1494-1797, SEQ ID NO: 1801-2089, SEQ ID NO: 2093-2199, SEQ ID NO: 2203-2295, SEQ ID NO: 2299-2629, SEQ ID NO: 2633-2809, SEQ ID NO: 2813-2972, SEQ ID NO: 2976-3042 or SEQ ID NO: 3046-3268, respectively, and any combination thereof.

20-22. (canceled)

23. The modified Soybean plant, plant part, or plant cell according to claim 1, wherein (a) the plant, plant part, or plant cell comprising the one or more gene editing derived mutations in the at least one gene selected from Glyma.01G239600, Glyma.01G228700, Glyma.10G010500.1, Glyma.11G010500, Glyma.13G173500, Glyma.14G005700, Glyma.17G064400, Glyma.16G149300, Glyma.11g011500, Glyma.02g005600, Glyma.17g030400 and Glyma19g030500, has a content of phytoestrogen that is reduced by about 10%, about 20%, about 30%, about 50%, about 60%, about 70%, about 80%, or about 90% compared to the content of phytoestrogen in a Soybean plant, plant part, or plant cell absent of said one or more mutations, and/or (b) the plant, plant part, or plant cell comprising the one or more gene editing derived mutations in the at least one gene selected from Glyma.17G036400, Glyma.19g135000 and Glyma.17G036300, has a protein content that is elevated by about 10%, about 20%, about 30%, about 50%, about 60%, about 70%, about 80%, or about 90% compared to the protein content in a Soybean plant, plant part, or plant cell absent of said one or more mutations.

24. The modified Soybean plant, plant part, or plant cell according to claim 23, wherein the phytoestrogen is selected from isoflavone and/or Coumestrol.

25. (canceled)

26. Soybean seed, tissue culture of regenerable cells, protoplasts, callus, pollen, plant parts or progeny of the modified Soybean plant of claim 1.

27. Food and non-food products incorporating the modified Soybean plant, plant part or plant cell or a seed of a Soybean plant of claim 1.

28. (canceled)

29. A method for producing a modified Soybean plant, plant part, or plant cell exhibiting reduced phytoestrogen content and/or increased protein content using targeted genome modification comprising steps of:
a. identifying a gene involved in phytoestrogen synthesis or increased protein content of a Soybean plant species;
b. synthesizing or designing a gRNA expression cassette corresponding to a target editing region along the Soybean genome, within the identified gene locus;
c. transforming said Soybean plant, plant part, or plant cell with CRISPR/Cas9 system;
d. screening the genome of said transformed plant, plant part, or plant cell for induced targeted mutation, e.g. loss of function mutation in the identified gene involved in phytoestrogen synthesis or increased protein content;
e. selecting said Soybean plant, plant part, or plant cell expressing desired one or more mutations in the editing target region, said mutations confer reduced phytoestrogen content or increased protein content; and
f. optionally, regenerating a plant from said transformed plant, plant part, or plant cell plant cell nucleus, or plant tissue and optionally screening said regenerated plants for a Soybean plant, with decreased phytoestrogen content or increased protein content.

30. The method according to claim 29, wherein the gRNA and its corresponding PAM is complementary to a sequence of a gene involved in phytoestrogen synthesis selected from a group comprising at least one of Glyma.01G239600, Glyma.01G228700, Glyma.10G010500.1, Glyma.11G010500, Glyma.13G173500, Glyma.14G005700, Glyma.17G064400, Glyma.16G149300, Glyma.11g011500, Glyma.02g005600, Glyma.17g030400 and Glyma19g030500 or to a sequence of a gene involved in increased protein content selected from a group comprising at least one of Glyma.17G036400, Glyma.19g135000 and Glyma.17G036300.

31. (canceled)

32. The method according to according to claim 29, wherein the plant, plant part, or plant cell is characterized by at least one of:
a. reduced phytoestrogen content and/or increased protein content, as compared to a Soybean plant absent of said one or more mutations;
b. modulated or altered expression of said at least one gene as compared to a Soybean plant absent of said one or more mutations; and
c. reduced expression of said at least one gene as compared to a Soybean plant absent of said one or more mutations.

33-36. (canceled)

37. The method according to claim 29, wherein the Glyma.01G239600, Glyma.01G228700, Glyma.10G010500.1, Glyma.11G010500, Glyma.13G173500, Glyma.14G005700, Glyma.17G064400, Glyma.16G149300, Glyma.17G036400, Glyma.17G036300, Glyma.19g135000, Glyma.11g011500, Glyma.02g005600, Glyma.17g030400 and Glyma19g030500 genes comprise a genomic sequence having at least 80% sequence identity to SEQ ID NO: 1, 220, 454, 674, 1014, 1305, 1491, 1798, 2090, 2200, 2296, 2630, 2810, 2973 and 3043, respectively.

38-48. (canceled)

49. The method according to claim 29, wherein said one or more mutations is generated in planta in said at least one Glyma.01G239600, Glyma.01G228700, Glyma.10G010500.1, Glyma.11G010500, Glyma.13G173500, Glyma.14G005700, Glyma.17G064400, Glyma.16G149300, Glyma.17G036400, Glyma.17G036300, Glyma.19g135000, Glyma.11g011500, Glyma.02g005600, Glyma.17g030400 and Glyma19g030500 genes via introduction of (a) Cas DNA and guide RNA (gRNA) sequence selected from the group consisting of a sequence comprising at least 85% sequence identity to at least one of SEQ ID NO: 4-219, SEQ ID NO: 223-453, SEQ ID NO: 457-673, SEQ ID NO: 677-1013, SEQ ID NO: 1017-1304, SEQ ID NO: 1308-1490, SEQ ID NO: 1494-1797, SEQ ID NO: 1801-2089, SEQ ID NO: 2093-2199, SEQ ID NO: 2203-2295, SEQ ID NO: 2299-2629, SEQ ID NO: 2633-2809, SEQ ID NO: 2813-2972, SEQ ID NO: 2976-3042 or SEQ ID NO: 3046-3268, respectively, or (b) a ribonucleoprotein (RNP) complex comprising Cas protein and gRNA sequence selected from the group consisting of a sequence comprising at least 85% sequence identity to at least one of SEQ ID NO: 4-219, SEQ ID NO: 223-453, SEQ ID NO: 457-673, SEQ ID NO: 677-1013, SEQ ID NO: 1017-1304, SEQ ID NO: 1308-1490, SEQ ID NO: 1494-1797, SEQ ID NO: 1801-2089, SEQ ID NO: 2093-2199, SEQ ID NO: 2203-2295, SEQ ID NO: 2299-2629, SEQ ID NO: 2633-2809, SEQ ID NO: 2813-2972, SEQ ID NO: 2976-3042 or SEQ ID NO: 3046-3268, respectively.

50-56. (canceled)

57. The method according to claim 29, further comprises steps of
(a) identifying at least one locus within a DNA sequence of a Soybean plant or a cell thereof selected from Glyma.01G239600, Glyma.01G228700, Glyma.10G010500.1, Glyma.11G010500, Glyma.13G173500, Glyma.14G005700, Glyma.17G064400, Glyma.16G149300, Glyma.11g011500, Glyma.02g005600, Glyma.17g030400 and Glyma19g030500 genes, and/or within a DNA sequence of a Soybean plant or a cell thereof selected from Glyma.17G036400, Glyma.19g135000 and Glyma.17G036300;
(b) identifying at least one custom endonuclease recognition sequence within the at least one locus of the gene; and
(c) identifying the Soybean plant, a cell thereof, or a progeny cell thereof as comprising a modification in the loci of the at least one gene, said modification confers modulated or altered expression, e.g. silencing, of at least one gene selected from Glyma.01G239600, Glyma.01G228700, Glyma.10G010500.1, Glyma.11G010500, Glyma.13G173500, Glyma.14G005700, Glyma.17G064400, Glyma.16G149300, Glyma.11g011500, Glyma.02g005600, Glyma.17g030400 and Glyma19g030500 and/or at least one gene selected from Glyma.17G036400, Glyma.19g135000 and Glyma.17G036300.

58-59. (canceled)

60. The method according to claim 29, wherein (a) the plant, plant part, or plant cell comprising one or more mutations introduced by targeted genome modification in at least one gene selected from Glyma.01G239600, Glyma.01G228700, Glyma.10G010500.1, Glyma.11G010500, Glyma.13G173500, Glyma.14G005700, Glyma.17G064400, Glyma.16G149300, Glyma.11g011500, Glyma.02g005600, Glyma.17g030400 and Glyma19g030500, has a content of phytoestrogen that is reduced by about 10%, about 20%, about 30%, about 50%, about 60%, about 70%, about 80%, or about 90% compared to the content of phytoestrogen in a Soybean plant, plant part, or plant cell absent of said one or more mutations, and/or wherein the plant, plant part, or plant cell comprising one or more mutations introduced by targeted genome modification in at least one gene selected from Glyma.17G036400, Glyma.19g135000 and Glyma.17G036300, has a protein content that is elevated by about 10%, about 20%, about 30%, about 50%, about 60%, about 70%, about 80%, or about 90% compared to the protein content in a Soybean plant, plant part, or plant cell absent of said one or more mutations.

61-63. (canceled)

64. A modified Soybean seed, pollen, plant parts or progeny with reduced phytoestrogen content and/or increased protein content, produced by the method according to claim 29, wherein said seed, pollen, plant parts or progeny with reduced phytoestrogen content comprises said one or more gene editing derived mutations in at least one gene selected from Glyma.01G239600, Glyma.01G228700, Glyma.10G010500.1, Glyma.11G010500, Glyma.13G173500, Glyma.14G005700, Glyma.17G064400, Glyma.16G149300, Glyma.11g011500, Glyma.02g005600, Glyma.17g030400 and Glyma19g030500, and said seed, pollen, plant parts or progeny with increased protein content comprises said one or more gene editing derived mutations in at least one gene selected from Glyma.17G036400, Glyma.19g135000 and Glyma.17G036300.

65. The method according to claim 29, wherein said method is useful for (a) reducing phytoestrogen content and/or increasing protein content in a Soybean plant, plant part or plant cell, using targeted genome modification, comprising introducing into the genome of the plant, plant part, or plant cell one or more mutations in at least one gene selected from Glyma.01G239600, Glyma.01G228700, Glyma.10G010500.1, Glyma.11G010500, Glyma.13G173500, Glyma.14G005700, Glyma.17G064400, Glyma.16G149300, Glyma.11g011500, Glyma.02g005600, Glyma.17g030400 and Glyma19g030500, conferring reduced phytoestrogen content, and/or introducing into the genome of the plant, plant part, or plant cell one or more mutations in at least one gene selected from Glyma.17G036400, Glyma.19g135000 and Glyma.17G036300, conferring increased protein content; and/or (b) increasing Soybean yield using targeted genome modification, comprising introducing into the genome of the Soybean plant, plant part, or plant cell one or more mutations in at least one gene selected from Glyma.01G239600, Glyma.01G228700, Glyma.10G010500.1, Glyma.11G010500, Glyma.13G173500, Glyma.14G005700, Glyma.17G064400, Glyma.16G149300, Glyma.17G036400, Glyma.17G036300, Glyma.19g135000, Glyma.11g011500, Glyma.02g005600, Glyma.17g030400 and Glyma19g030500.

66-72. (canceled)

73. A construct comprising or encoding (a) a nucleotide sequence encoding a Cas molecule and one or more gRNA molecules comprising a sequence selected from the group consisting of a sequence comprising at least 85% sequence identity to at least one of SEQ ID NO: 4-219, SEQ ID NO: 223-453, SEQ ID NO: 457-673, SEQ ID NO: 677-1013, SEQ ID NO: 1017-1304, SEQ ID NO: 1308-1490, SEQ ID NO: 1494-1797, SEQ ID NO: 1801-2089, SEQ ID NO: 2093-2199, SEQ ID NO: 2203-2295, SEQ ID NO: 2299-2629, SEQ ID NO: 2633-2809, SEQ ID NO: 2813-2972, SEQ ID NO: 2976-3042, SEQ ID NO: 3046-3268, and any combination thereof, or (b) a ribonucleoprotein (RNP) complex comprising Cas protein and one or more gRNA molecules comprising a sequence comprising at least 85% sequence identity to at least one of SEQ ID NO: 4-219, SEQ ID NO: 223-453, SEQ ID NO: 457-673, SEQ ID NO: 677-1013, SEQ ID NO: 1017-1304, SEQ ID NO: 1308-1490, SEQ ID NO: 1494-1797, SEQ ID NO: 1801-2089, SEQ ID NO: 2093-2199, SEQ ID NO: 2203-2295, SEQ ID NO: 2299-2629, SEQ ID NO: 2633-2809, SEQ ID NO: 2813-2972, SEQ ID NO: 2976-3042 or SEQ ID NO: 3046-3268, and any combination thereof.

74. A method of modifying the phytoestrogen content or protein content of a Soybean plant, plant part, or plant cell, comprising introducing into a Soybean plant, plant part, or plant cell the construct of claim 73 comprising or encoding (a) (i) a nucleotide sequence encoding a Cas molecule and one or more gRNA molecules comprising a sequence selected from the group consisting of a sequence comprising at least 85% sequence identity to at least one of SEQ ID NO: 4-219, SEQ ID NO: 223-453, SEQ ID NO: 457-673, SEQ ID NO: 677-1013, SEQ ID NO: 1017-1304, SEQ ID NO: 1308-1490, SEQ ID NO: 1494-1797, SEQ ID NO: 1801-2089, SEQ ID NO: 2633-2809, SEQ ID NO: 2813-2972, SEQ ID NO: 2976-3042, SEQ ID NO: 3046-3268, and any combination thereof, or (ii) a ribonucleoprotein (RNP) complex comprising Cas protein and one or more gRNA molecules comprising a sequence comprising at least 85% sequence identity to at least one of SEQ ID NO: 4-219, SEQ ID NO: 223-453, SEQ ID NO: 457-673, SEQ ID NO: 677-1013, SEQ ID NO: 1017-1304, SEQ ID NO: 1308-1490, SEQ ID NO: 1494-1797, SEQ ID NO: 1801-2089, SEQ ID NO: 2633-2809, SEQ ID NO: 2813-2972, SEQ ID NO: 2976-3042 or SEQ ID NO: 3046-3268, and any combination thereof, to modify the phytoestrogen content of the Soybean plant, plant part, or plant cell, or (b) (i) a nucleotide sequence encoding a Cas molecule and one or more gRNA molecules comprising a sequence selected from the group consisting of a sequence comprising at least 85% sequence identity to at least one of SEQ ID NO: 2093-2199, SEQ ID NO: 2203-2295, SEQ ID NO: 2299-2629, and any combination thereof, or (ii) a ribonucleoprotein (RNP) complex comprising Cas protein and one or more gRNA molecules comprising a sequence comprising at least 85% sequence identity to at least one of SEQ ID NO: 2093-2199, SEQ ID NO: 2203-2295, SEQ ID NO: 2299-2629, and any combination thereof, respectively, to modify the protein content of the Soybean plant, plant part, or plant cell.

75-77. (canceled)

The application's sequence listing, which the Patent Office published only in electronic form, follows.

SEQUENCE LISTING (3268 sequences)

SEQ ID NO: 1 - DNA, 2229 bp, Glycine max
attggcctcataattttttgcggaataaatttaggttcttaatttcaaatttcgtctaaaacgtaaaaagtagagtaataaaaggcaccttcaaaagtaaaattaaaccttttaaaagaatatgtatgtatcggaactcaagtttatccttttagctttttagcataaaataattgaaagtcatttttgtcctattacacccacccatgcttgcttggtaggtggggttgacatgtttgactgcacgtgattcgagtaggtttaaatattttatataaacattcgaaaaacagtatttgatgatcgagtcggaaaaatagtatttgtaaccacattacaaatatctaaatatatgggtatagtgagagacaatatatttaaatgttactcctacaaattaattataatcatggtcaaaatgtggacaagtcttgtactagttgctcgtttttaaattctcatcatcaagattcctgctacctactcccctagttgtaaaattcatttcagcaactagaagatggctatctgattataaaagttattcttttttcacgatctataaataatttcaccctaacccgcagaagattaggagtagaatggcgaaggagatagtgaaagagcttcttcctctaattcgagtgtacaaggatggcagcgtggagcgtcttctaagctctgaaaacgtggcagcctcccctgaagatccccaaactggagtctcatccaaagacatagtcatcgcagacaacccctacgtctccgctcgcattttccttcccaaatcccaccacactaacaacaaactccccatcttcctctacttccacggtggcgccttttgcgtcgaatccgccttctcctttttcgtccaccgctatctcaacatcttggcctcagaagccaacataatagccatctccgtcgacttcagactcctcccacaccaccctatccctgctgcctacgaagacggttggaccaccctcaaatggattgcttcccacgccaacaacaccaacaccaccaacccggagccatggctactcaaccacgccgacttcaccaaagtctacgtaggaggtgaaaccagcggtgctaacatcgcacacaacctgcttttgcgtgcaggtaacgaatccctccccggggatctgaaaatattgggtggattactatgctgccccttcttctggggctcgaagccaattgggtcggaggctgttgaggggcacgagcagagtttggccatgaaggtctggaactttgcctgccctgatgcccccggtggaatcgataacccctggatcaacccctgtgttcctggggcaccctctttggccactcttgcctgctctaagttgctcgttactatcactggcaaagacgagttcagagacagagatattctctaccaccacaccgttgagcaaagtggctggcaaggtgaacttcaactctttgatgctggcgatgaggagcatgctttccagctcttcaagcctgagactcatcttgctaaagccatgatcaaacgcttggcttcttttctggtttgatggatggcttgtcatgagagattccaaacataataaatcgtgcgtgccttcacctgtcttgtctactactccagttttagattgaattttatgttttagttattattcaacaaaaacacaataattccctctccctcgttgtttttgtttttgtttttgtttgtcaccattatcaatacctatcactgtatgtggtcattattcaacaaaaggatgccgtacactcctgaattaatatttcaattttcaatttaggctgttgtcggctagatgaattcaacgaaactaacacagcaattccaactcatgacctaggttaacttcaagttgcggtagtacaaacatgttggatatctaacaaaaacacaataatgcaactctgaatgaatgtgcctactttgtgaaagattttggtttttttctatcttaaatgaaataatatgaggggaattcagtaaaaaataaaataaaatcttcttttaattttttaacgatttgaagtatcatttgaagatgaagtacttaacagtaaaattattttaaattaacatttaaatgggtatctctatgattaaacggaattttgaagtaaaatatatcggaaaaaattaaagtaaaaagataaaaatttcattttatcgtattaagaaaaataagaatacttaaa

SEQ ID NO: 2 - DNA, 960 bp, Glycine max
atggcgaaggagatagtgaaagagcttcttcctctaattcgagtgtacaaggatggcagcgtggagcgtcttctaagctctgaaaacgtggcagcctcccctgaagatccccaaactggagtctcatccaaagacatagtcatcgcagacaacccctacgtctccgctcgcattttccttcccaaatcccaccacactaacaacaaactccccatcttcctctacttccacggtggcgccttttgcgtcgaatccgccttctcctttttcgtccaccgctatctcaacatcttggcctcagaagccaacataatagccatctccgtcgacttcagactcctcccacaccaccctatccctgctgcctacgaagacggttggaccaccctcaaatggattgcttcccacgccaacaacaccaacaccaccaacccggagccatggctactcaaccacgccgacttcaccaaagtctacgtaggaggtgaaaccagcggtgctaacatcgcacacaacctgcttttgcgtgcaggtaacgaatccctccccggggatctgaaaatattgggtggattactatgctgccccttcttctggggctcgaagccaattgggtcggaggctgttgaggggcacgagcagagtttggccatgaaggtctggaactttgcctgccctgatgcccccggtggaatcgataacccctggatcaacccctgtgttcctggggcaccctctttggccactcttgcctgctctaagttgctcgttactatcactggcaaagacgagttcagagacagagatattctctaccaccacaccgttgagcaaagtggctggcaaggtgaacttcaactctttgatgctggcgatgaggagcatgctttccagctcttcaagcctgagactcatcttgctaaagccatgatcaaacgcttggcttcttttctggtttga

SEQ ID NO: 3 - protein, 319 aa, Glycine max
MAKEIVKELLPLIRVYKDGSVERLLSSENVAASPEDPQTGVSSKDIVIADNPYVSARIFLPKSHHTNNKLPIFLYFHGGAFCVESAFSFFVHRYLNILASEANIIAISVDFRLLPHHPIPAAYEDGWTTLKWIASHANNTNTTNPEPWLLNHADFTKVYVGGETSGANIAHNLLLRAGNESLPGDLKILGGLLCCPFFWGSKPIGSEAVEGHEQSLAMKVWNFACPDAPGGIDNPWINPCVPGAPSLATLACSKLLVTITGKDEFRDRDILYHHTVEQSGWQGELQLFDAGDEEHAFQLFKPETHLAKAMIKRLASFLV

SEQ ID NO: 4 - DNA, 20 bp, Glycine max
ttattccgcaaaaaattatg

SEQ ID NO: 5 - DNA, 20 bp, Glycine max
attggcctcataattttttg

SEQ ID NO: 6 - DNA, 20 bp, Glycine max
attttttgcggaataaattt

SEQ ID NO: 7 - DNA, 20 bp, Glycine max
gtaaaaagtagagtaataaa

SEQ ID NO: 8 - DNA, 20 bp, Glycine max
aggtttaattttacttttga

SEQ ID NO: 9 - DNA, 20 bp, Glycine max
tacatacatattcttttaaa

SEQ ID NO: 10 - DNA, 20 bp, Glycine max
ttaaaagaatatgtatgtat

SEQ ID NO: 11 - DNA, 20 bp, Glycine max
ttttatgctaaaaagctaaa

SEQ ID NO: 12 - DNA, 20 bp, Glycine max
caagcatgggtgggtgtaat

SEQ ID NO: 13 - DNA, 20 bp, Glycine max
cctaccaagcaagcatgggt

SEQ ID NO: 14 - DNA, 20 bp, Glycine max
acctaccaagcaagcatggg

SEQ ID NO: 15 - DNA, 20 bp, Glycine max
cccacctaccaagcaagcat

SEQ ID NO: 16 - DNA, 20 bp, Glycine max
ccccacctaccaagcaagca

SEQ ID NO: 17 - DNA, 20 bp, Glycine max
tacacccacccatgcttgct

SEQ ID NO: 18 - DNA, 20 bp, Glycine max
cccacccatgcttgcttggt

SEQ ID NO: 19 - DNA, 20 bp, Glycine max
acccatgcttgcttggtagg

SEQ ID NO: 20 - DNA, 20 bp, Glycine max
cccatgcttgcttggtaggt

SEQ ID NO: 21 - DNA, 20 bp, Glycine max
ccatgcttgcttggtaggtg

SEQ ID NO: 22 - DNA, 20 bp, Glycine max
tgactgcacgtgattcgagt

SEQ ID NO: 23 - DNA, 20 bp, Glycine max
acagtatttgatgatcgagt

SEQ ID NO: 24 - DNA, 20 bp, Glycine max
atatttagatatttgtaatg

SEQ ID NO: 25 - DNA, 20 bp, Glycine max
attacaaatatctaaatata

SEQ ID NO: 26 - DNA, 20 bp, Glycine max
ttacaaatatctaaatatat

SEQ ID NO: 27 - DNA, 20 bp, Glycine max
catgattataattaatttgt

SEQ ID NO: 28 - DNA, 20 bp, Glycine max
ctacaaattaattataatca

SEQ ID NO: 29 - DNA, 20 bp, Glycine max
ttataatcatggtcaaaatg

SEQ ID NO: 30 - DNA, 20 bp, Glycine max
caactaggggagtaggtagc

SEQ ID NO: 31 - DNA, 20 bp, Glycine max
aattttacaactaggggagt

SEQ ID NO: 32 - DNA, 20 bp, Glycine max
gaaatgaattttacaactag

SEQ ID NO: 33 - DNA, 20 bp, Glycine max
tgaaatgaattttacaacta

SEQ ID NO: 34 - DNA, 20 bp, Glycine max
ctgaaatgaattttacaact

SEQ ID NO: 35 - DNA, 20 bp, Glycine max
tcatttcagcaactagaaga

SEQ ID NO: 36 - DNA, 20 bp, Glycine max
tcctaatcttctgcgggtta

SEQ ID NO: 37 - DNA, 20 bp, Glycine max
ctcctaatcttctgcgggtt

SEQ ID NO: 38 - DNA, 20 bp, Glycine max
ttctactcctaatcttctgc

SEQ ID NO: 39 - DNA, 20 bp, Glycine max
attctactcctaatcttctg

SEQ ID NO: 40 - DNA, 20 bp, Glycine max
accctaacccgcagaagatt

SEQ ID NO: 41 - DNA, 20 bp, Glycine max
gcagaagattaggagtagaa

SEQ ID NO: 42 - DNA, 20 bp, Glycine max
gattaggagtagaatggcga

SEQ ID NO: 43 - DNA, 20 bp, Glycine max
tccttgtacactcgaattag

SEQ ID NO: 44 - DNA, 20 bp, Glycine max
tcctctaattcgagtgtaca

SEQ ID NO: 45 - DNA, 20 bp, Glycine max
ctaattcgagtgtacaagga

SEQ ID NO: 46 - DNA, 20 bp, Glycine max
agtgtacaaggatggcagcg

SEQ ID NO: 47 - DNA, 20 bp, Glycine max
tcttctaagctctgaaaacg

SEQ ID NO: 48 - DNA, 20 bp, Glycine max
agtttggggatcttcagggg

SEQ ID NO: 49 - DNA, 20 bp, Glycine max
tccagtttggggatcttcag

SEQ ID NO: 50 - DNA, 20 bp, Glycine max
ctccagtttggggatcttca

SEQ ID NO: 51 - DNA, 20 bp, Glycine max
actccagtttggggatcttc

SEQ ID NO: 52 - DNA, 20 bp, Glycine max
tcccctgaagatccccaaac

SEQ ID NO: 53 - DNA, 20 bp, Glycine max
ttggatgagactccagtttg

SEQ ID NO: 54 - DNA, 20 bp, Glycine max
tttggatgagactccagttt

SEQ ID NO: 55 - DNA, 20 bp, Glycine max
ctttggatgagactccagtt

SEQ ID NO: 56 - DNA, 20 bp, Glycine max
gtctgcgatgactatgtctt

SEQ ID NO: 57 - DNA, 20 bp, Glycine max
aaatgcgagcggagacgtag

SEQ ID NO: 58 - DNA, 20 bp, Glycine max
aaaatgcgagcggagacgta

SEQ ID NO: 59 - DNA, 20 bp, Glycine max
gaaaatgcgagcggagacgt

SEQ ID NO: 60 - DNA, 20 bp, Glycine max
tttgggaaggaaaatgcgag

SEQ ID NO: 61 - DNA, 20 bp, Glycine max
tagtgtggtgggatttggga

SEQ ID NO: 62 - DNA, 20 bp, Glycine max
ttgttagtgtggtgggattt

SEQ ID NO: 63 - DNA, 20 bp, Glycine max
gttgttagtgtggtgggatt

SEQ ID NO: 64 - DNA, 20 bp, Glycine max
gagtttgttgttagtgtggt

SEQ ID NO: 65 - DNA, 20 bp, Glycine max
ggagtttgttgttagtgtgg

SEQ ID NO: 66 - DNA, 20 bp, Glycine max
tggggagtttgttgttagtg

SEQ ID NO: 67 - DNA, 20 bp, Glycine max
cgtggaagtagaggaagatg

SEQ ID NO: 68 - DNA, 20 bp, Glycine max
ccgtggaagtagaggaagat

SEQ ID NO: 69 - DNA, 20 bp, Glycine max
accgtggaagtagaggaaga

SEQ ID NO: 70 - DNA, 20 bp, Glycine max
aggcgccaccgtggaagtag

SEQ ID NO: 71 - DNA, 20 bp, Glycine max
cccatcttcctctacttcca

SEQ ID NO: 72 - DNA, 20 bp, Glycine max
atcttcctctacttccacgg

SEQ ID NO: 73 - DNA, 20 bp, Glycine max
cgacgcaaaaggcgccaccg

SEQ ID NO: 74 - DNA, 20 bp, Glycine max
gaaggcggattcgacgcaaa

SEQ ID NO: 75 - DNA, 20 bp, Glycine max
gtggacgaaaaaggagaagg

SEQ ID NO: 76 - DNA, 20 bp, Glycine max
gcggtggacgaaaaaggaga

SEQ ID NO: 77 - DNA, 20 bp, Glycine max
gagatagcggtggacgaaaa

SEQ ID NO: 78 - DNA, 20 bp, Glycine max
ccaagatgttgagatagcgg

SEQ ID NO: 79 - DNA, 20 bp, Glycine max
aggccaagatgttgagatag

SEQ ID NO: 80 - DNA, 20 bp, Glycine max
ccaccgctatctcaacatct

SEQ ID NO: 81 - DNA, 20 bp, Glycine max
ggctattatgttggcttctg

SEQ ID NO: 82 - DNA, 20 bp, Glycine max
gacggagatggctattatgt

SEQ ID NO: 83 - DNA, 20 bp, Glycine max
gagtctgaagtcgacggaga

SEQ ID NO: 84 - DNA, 20 bp, Glycine max
tgggaggagtctgaagtcga

SEQ ID NO: 85 - DNA, 20 bp, Glycine max
cagggatagggtggtgtggg

SEQ ID NO: 86 - DNA, 20 bp, Glycine max
cagcagggatagggtggtgt

SEQ ID NO: 87 - DNA, 20 bp, Glycine max
gcagcagggatagggtggtg

SEQ ID NO: 88 - DNA, 20 bp, Glycine max
cgtaggcagcagggataggg

SEQ ID NO: 89 - DNA, 20 bp, Glycine max
cttcgtaggcagcagggata

SEQ ID NO: 90 - DNA, 20 bp, Glycine max
tcttcgtaggcagcagggat

SEQ ID NO: 91 - DNA, 20 bp, Glycine max
aaccgtcttcgtaggcagca

SEQ ID NO: 92 - DNA, 20 bp, Glycine max
caaccgtcttcgtaggcagc

SEQ ID NO: 93 - DNA, 20 bp, Glycine max
ggtggtccaaccgtcttcgt

SEQ ID NO: 94 - DNA, 20 bp, Glycine max
atccctgctgcctacgaaga

SEQ ID NO: 95 - DNA, 20 bp, Glycine max
ctgctgcctacgaagacggt

SEQ ID NO: 96 - DNA, 20 bp, Glycine max
ggaagcaatccatttgaggg

SEQ ID NO: 97 - DNA, 20 bp, Glycine max
acggttggaccaccctcaaa

SEQ ID NO: 98 - DNA, 20 bp, Glycine max
gtgggaagcaatccatttga

SEQ ID NO: 99 - DNA, 20 bp, Glycine max
cgtgggaagcaatccatttg

SEQ ID NO: 100 - DNA, 20 bp, Glycine max
ggtgttggtgttgttggcgt

SEQ ID NO: 101 - DNA, 20 bp, Glycine max
tggtgttggtgttgttggcg

SEQ ID NO: 102 - DNA, 20 bp, Glycine max
gttggtggtgttggtgttgt

SEQ ID NO: 103 - DNA, 20 bp, Glycine max
tggctccgggttggtggtgt

SEQ ID NO: 104 - DNA, 20 bp, Glycine max
caacaccaacaccaccaacc

SEQ ID NO: 105 - DNA, 20 bp, Glycine max
tagccatggctccgggttgg

SEQ ID NO: 106 - DNA, 20 bp, Glycine max
gagtagccatggctccgggt

SEQ ID NO: 107 - DNA, 20 bp, Glycine max
ggttgagtagccatggctcc

SEQ ID NO: 108 - DNA, 20 bp, Glycine max
acaccaccaacccggagcca

SEQ ID NO: 109 - DNA, 20 bp, Glycine max
tggttgagtagccatggctc

SEQ ID NO: 110 - DNA, 20 bp, Glycine max
tcggcgtggttgagtagcca

SEQ ID NO: 111 - DNA, 20 bp, Glycine max
agactttggtgaagtcggcg

SEQ ID NO: 112 - DNA, 20 bp, Glycine max
tacgtagactttggtgaagt

SEQ ID NO: 113 - DNA, 20 bp, Glycine max
ttcacctcctacgtagactt

SEQ ID NO: 114 - DNA, 20 bp, Glycine max
gacttcaccaaagtctacgt

SEQ ID NO: 115 - DNA, 20 bp, Glycine max
ttcaccaaagtctacgtagg

SEQ ID NO: 116 - DNA, 20 bp, Glycine max
tacgtaggaggtgaaaccag

SEQ ID NO: 117 - DNA, 20 bp, Glycine max
gtgtgcgatgttagcaccgc

SEQ ID NO: 118 - DNA, 20 bp, Glycine max
cgttacctgcacgcaaaagc

SEQ ID NO: 119 - DNA, 20 bp, Glycine max
cacaacctgcttttgcgtgc

SEQ ID NO: 120 - DNA, 20 bp, Glycine max
gcaggtaacgaatccctccc

SEQ ID NO: 121 - DNA, 20 bp, Glycine max
caggtaacgaatccctcccc

SEQ ID NO: 122 - DNA, 20 bp, Glycine max
aggtaacgaatccctccccg

SEQ ID NO: 123 - DNA, 20 bp, Glycine max
tattttcagatccccgggga

SEQ ID NO: 124 - DNA, 20 bp, Glycine max
atattttcagatccccgggg

SEQ ID NO: 125 - DNA, 20 bp, Glycine max
ccaatattttcagatccccg

SEQ ID NO: 126 - DNA, 20 bp, Glycine max
cccaatattttcagatcccc

SEQ ID NO: 127 - DNA, 20 bp, Glycine max
acccaatattttcagatccc

SEQ ID NO: 128 - DNA, 20 bp, Glycine max
ccccggggatctgaaaatat

SEQ ID NO: 129 - DNA, 20 bp, Glycine max
cccggggatctgaaaatatt

SEQ ID NO: 130 - DNA, 20 bp, Glycine max
ggggatctgaaaatattggg

SEQ ID NO: 131 - DNA, 20 bp, Glycine max
gcttcgagccccagaagaag

SEQ ID NO: 132 - DNA, 20 bp, Glycine max
tactatgctgccccttcttc

SEQ ID NO: 133 - DNA, 20 bp, Glycine max
ggcttcgagccccagaagaa

SEQ ID NO: 134 - DNA, 20 bp, Glycine max
actatgctgccccttcttct

SEQ ID NO: 135 - DNA, 20 bp, Glycine max
tggcttcgagccccagaaga

SEQ ID NO: 136 - DNA, 20 bp, Glycine max
ctatgctgccccttcttctg

SEQ ID NO: 137 - DNA, 20 bp, Glycine max
ttctggggctcgaagccaat

SEQ ID NO: 138 - DNA, 20 bp, Glycine max
tctggggctcgaagccaatt

SEQ ID NO: 139 - DNA, 20 bp, Glycine max
tcaacagcctccgacccaat

SEQ ID NO: 140 - DNA, 20 bp, Glycine max
gggctcgaagccaattgggt

SEQ ID NO: 141 - DNA, 20 bp, Glycine max
ctcgaagccaattgggtcgg

SEQ ID NO: 142 - DNA, 20 bp, Glycine max
aattgggtcggaggctgttg

SEQ ID NO: 143 - DNA, 20 bp, Glycine max
attgggtcggaggctgttga

SEQ ID NO: 144 - DNA, 20 bp, Glycine max
ttgggtcggaggctgttgag

SEQ ID NO: 145 - DNA, 20 bp, Glycine max
tgaggggcacgagcagagtt

SEQ ID NO: 146 - DNA, 20 bp, Glycine max
cgagcagagtttggccatga

SEQ ID NO: 147 - DNA, 20 bp, Glycine max
ggcaaagttccagaccttca

SEQ ID NO: 148 - DNA, 20 bp, Glycine max
agagtttggccatgaaggtc

SEQ ID NO: 149 - DNA, 20 bp, Glycine max
tccaccgggggcatcagggc

SEQ ID NO: 150 - DNA, 20 bp, Glycine max
cgattccaccgggggcatca

SEQ ID NO: 151 - DNA, 20 bp, Glycine max
tcgattccaccgggggcatc

SEQ ID NO: 152 - DNA, 20 bp, Glycine max
tttgcctgccctgatgcccc

SEQ ID NO: 153 - DNA, 20 bp, Glycine max
gcctgccctgatgcccccgg

SEQ ID NO: 154 - DNA, 20 bp, Glycine max
ggggttatcgattccaccgg

SEQ ID NO: 155 - DNA, 20 bp, Glycine max
aggggttatcgattccaccg

SEQ ID NO: 156 - DNA, 20 bp, Glycine max
caggggttatcgattccacc

SEQ ID NO: 157 - DNA, 20 bp, Glycine max
ccaggggttatcgattccac

SEQ ID NO: 158 - DNA, 20 bp, Glycine max
ccggtggaatcgataacccc

SEQ ID NO: 159 - DNA, 20 bp, Glycine max
gaacacaggggttgatccag

SEQ ID NO: 160 - DNA, 20 bp, Glycine max
ggaacacaggggttgatcca

SEQ ID NO: 161 - DNA, 20 bp, Glycine max
aggaacacaggggttgatcc

SEQ ID NO: 162 - DNA, 20 bp, Glycine max
agggtgccccaggaacacag

SEQ ID NO: 163 - DNA, 20 bp, Glycine max
gagggtgccccaggaacaca

SEQ ID NO: 164 - DNA, 20 bp, Glycine max
agagggtgccccaggaacac

SEQ ID NO: 165 - DNA, 20 bp, Glycine max
tggatcaacccctgtgttcc

SEQ ID NO: 166 - DNA, 20 bp, Glycine max
ggatcaacccctgtgttcct

SEQ ID NO: 167 - DNA, 20 bp, Glycine max
gatcaacccctgtgttcctg

SEQ ID NO: 168 - DNA, 20 bp, Glycine max
gtggccaaagagggtgcccc

SEQ ID NO: 169 - DNA, 20 bp, Glycine max
tgttcctggggcaccctctt

SEQ ID NO: 170 - DNA, 20 bp, Glycine max
caggcaagagtggccaaaga

SEQ ID NO: 171 - DNA, 20 bp, Glycine max
gcaggcaagagtggccaaag

SEQ ID NO: 172 - DNA, 20 bp, Glycine max
caacttagagcaggcaagag

SEQ ID NO: 173 - DNA, 20 bp, Glycine max
agtaacgagcaacttagagc

SEQ ID NO: 174 - DNA, 20 bp, Glycine max
aagttgctcgttactatcac

SEQ ID NO: 175 - DNA, 20 bp, Glycine max
cactttgctcaacggtgtgg

SEQ ID NO: 176 - DNA, 20 bp, Glycine max
agccactttgctcaacggtg

SEQ ID NO: 177 - DNA, 20 bp, Glycine max
ttgccagccactttgctcaa

SEQ ID NO: 178 - DNA, 20 bp, Glycine max
caccacaccgttgagcaaag

SEQ ID NO: 179 - DNA, 20 bp, Glycine max
acaccgttgagcaaagtggc

SEQ ID NO: 180 - DNA, 20 bp, Glycine max
gttgagcaaagtggctggca

SEQ ID NO: 181 - DNA, 20 bp, Glycine max
gaacttcaactctttgatgc

SEQ ID NO: 182 - DNA, 20 bp, Glycine max
actctttgatgctggcgatg

SEQ ID NO: 183 - DNA, 20 bp, Glycine max
gagtctcaggcttgaagagc

SEQ ID NO: 184 - DNA, 20 bp, Glycine max
gctttagcaagatgagtctc

SEQ ID NO: 185 - DNA, 20 bp, Glycine max
agaagccaagcgtttgatca

SEQ ID NO: 186 - DNA, 20 bp, Glycine max
taaagccatgatcaaacgct

SEQ ID NO: 187 - DNA, 20 bp, Glycine max
caaacgcttggcttcttttc

SEQ ID NO: 188 - DNA, 20 bp, Glycine max
tggcttcttttctggtttga

SEQ ID NO: 189 - DNA, 20 bp, Glycine max
ttcttttctggtttgatgga

SEQ ID NO: 190 - DNA, 20 bp, Glycine max
cacgcacgatttattatgtt

SEQ ID NO: 191 - DNA, 20 bp, Glycine max
gtagtagacaagacaggtga

SEQ ID NO: 192 - DNA, 20 bp, Glycine max
actggagtagtagacaagac

SEQ ID NO: 193 - DNA, 20 bp, Glycine max
cataaaattcaatctaaaac

SEQ ID NO: 194 - DNA, 20 bp, Glycine max
aacaaaaacaacgagggaga

SEQ ID NO: 195 - DNA, 20 bp, Glycine max
aaacaaaaacaacgagggag

SEQ ID NO: 196 - DNA, 20 bp, Glycine max
aacaaaaacaaaaacaacga

SEQ ID NO: 197 - DNA, 20 bp, Glycine max
aaacaaaaacaaaaacaacg

SEQ ID NO: 198 - DNA, 20 bp, Glycine max
acagtgataggtattgataa

SEQ ID NO: 199 - DNA, 20 bp, Glycine max
taatgaccacatacagtgat

SEQ ID NO: 200 - DNA, 20 bp, Glycine max
tcaatacctatcactgtatg

SEQ ID NO: 201 - DNA, 20 bp, Glycine max
tgtggtcattattcaacaaa

SEQ ID NO: 202 - DNA, 20 bp, Glycine max
aatattaattcaggagtgta

SEQ ID NO: 203 - DNA, 20 bp, Glycine max
gaaaattgaaatattaattc

SEQ ID NO: 204 - DNA, 20 bp, Glycine max
aatatttcaattttcaattt

SEQ ID NO: 205 - DNA, 20 bp, Glycine max
ttttcaatttaggctgttgt

SEQ ID NO: 206 - DNA, 20 bp, Glycine max
agttaacctaggtcatgagt

SEQ ID NO: 207 - DNA, 20 bp, Glycine max
gcaattccaactcatgacct

SEQ ID NO: 208 - DNA, 20 bp, Glycine max
ccgcaacttgaagttaacct

SEQ ID NO: 209 - DNA, 20 bp, Glycine max
cctaggttaacttcaagttg

SEQ ID NO: 210 - DNA, 20 bp, Glycine max
ttgcggtagtacaaacatgt

SEQ ID NO: 211 - DNA, 20 bp, Glycine max
accaaaatctttcacaaagt

SEQ ID NO: 212 - DNA, 20 bp, Glycine max
gcctactttgtgaaagattt

SEQ ID NO: 213 - DNA, 20 bp, Glycine max
atcttaaatgaaataatatg

SEQ ID NO: 214 - DNA, 20 bp, Glycine max
tcttaaatgaaataatatga

SEQ ID NO: 215 - DNA, 20 bp, Glycine max
cttaaatgaaataatatgag

SEQ ID NO: 216 - DNA, 20 bp, Glycine max
attttaaattaacatttaaa

SEQ ID NO: 217 - DNA, 20 bp, Glycine max
ttttaaattaacatttaaat

SEQ ID NO: 218 - DNA, 20 bp, Glycine max
tgggtatctctatgattaaa

SEQ ID NO: 219 - DNA, 20 bp, Glycine max
aattttgaagtaaaatatat

SEQ ID NO: 220 - DNA, 3006 bp, Glycine max
tcaatgagcatacattattattaaggtaaagttttttactgtgtgttaaccaattaaaaacatttataatataaattttaagagaatcaataaatttatcacacttaatcatctgtgattgaataagttaccaatataattagtacatgtatgatgtagtttttttttttaaaaaagattaaagtactgaagctaatattccatcgaatataaaaaataataattccatccaataaaacatatagtagacatataattcagttacacttgcaaattccaattggtcagaagtcaaccacatgtttggttttttttatggatacccaagttgatgcatggggtagatagagatgcataaaatatccccaattattgcctgaaaataaaataataaataggggtagaggcggtgttgaaaaaacatgcgggcatatgccaccaaactcataggtcacatactaacaagcagtcatagtaaacggtggaaaatatgttcgtgtgtatggtgcatgcacgtgatactcacctaccctcccatccactctctccctacatatatataagatgctatctccctaagcaacttcaaaccacagcttaattctctctactactgctagctgtgacttgttttgagttcaatcaaatcgcattggtatctgaaatcaggaaagatggttagcgtagctgagatcaggcaggcacaaagggcagaaggcccagcaaccatccttgccattggaactgcaaacccaccaaaccgtgttgatcagagcacctatcctgattactacttcagaatcaccaacagtgaccacatgaccgagctcaaagagaaatttcagcgcatgtgtatgtactgccatactctcatcttaatttttccatatttctcacttctacaaaattgtttttctacatccgttttaatttatacaaataacacttgttaatttggcacatcttaattctgtcttctcgttacattatattatctatcacgtcgatctgcgaatcattcttgaaataaataaataaataaatctaattgggtgcaaatattaaaatggcatcaaggtttttataagttacttagtctaaatagttaaaaattaaattgataggtttttgcatttcaatagtagctagtcattatgtatagttagagattattagtcttttaactctccctttcaaaaaaaaaaaaaaaagaggtgataattcgttatggtgtttgttgtcttgattatacaatatagatcgtttacattattatttctttatgactaattttcaggtgacaagtctatgatcaagacgagatatatgtacctaaacgaagagatcttgaaagagaatccaaacatgtgtgcttacatggcaccttctttggatgctaggcaagacatggtggtggtagaggtaccaaagctagggaaagaggctgcagtaaaggccataaaggagtggggccagccaaagtcaaagattacccacttgatcttctgcaccactagcggtgtggacatgcctggtgctgattaccaactcaccaaacaattgggccttcgcccttatgtgaagaggtacatgatgtaccaacaaggttgctttgcaggtggcacggttcttcgtttggccaaggatttggctgagaacaacaagggtgcacgtgtgcttgttgtctgctctgagatcactgcagtcacattccgtgggccaagtgacactcaccttgatagtcttgtgggccaagcattgtttggagatggagctgctgcagtcattgttggttctgacccaattccacaagttgagaagcctttgtatgagcttgtttggactgcacaaacaattgctccagacagtgaaggtgctattgatggacaccttcgtgaagttggactcacatttcacctcctcaaggatgttcccgggattgtctcaaagaacattgataaggcactttttgaggctttcaacccattgaacatctctgattacaactccatcttttggattgcacaccctggtgggcctgcgattttagaccaagttgagcaaaagttgggtctcaaacctgagaagatgaaggccactagagatgtgcttagtgaatatgggaacatgtcaagtgcttgtgttcttttcatcttggatgagatgaggaggaaatctgctgaaaatggacataaaaccacaggtgaaggacttgaatggggtgtgttgttcggttttggacctggacttaccattgaaactgttgttttgcatagtgtggccatctgagatgcctcatatattatttcattattgtgtaccacttttcaaacttgcttggggtttgtaacaacaacaaccaccaaaaaaaaaaaactcgtttagagtttgtttgtgtacgtttatattaaaataataatacgtgtttggtggctttttagcctaattatcaataacaggcatttgttttagattttttttctttcatgatctttattattataaattttatcttagattgcatgtaaccttgtttgctagcgatatttgattttaaataatcgaaaaaaatgaggacaaattgactatcgatcatttgggttatgccgccgtttatttggactgaaaatgggtagtaagttgaaaaaacaagagttggtatatatgtcttgcatttggactctggatgagaatacatttatcattttcaactttgtgagagtgagaaaatataattacgtagtcgaaaagcgtcggcactaagatgtctttgcctatgactccgtaagaaagattcgaagacgcatgatttacttttctccctgggtggccaactgacacaagttgccttctctcttatgcaaatgggtacgtgtgtgtttccttttctactttggatatttgtgcactatttgagtgtaaatattcttcacttttgtgtatatcatctgtacagcaaaatacaaatgatatcaagactgacaaaataatttgcctcccctttta

SEQ ID NO: 221 - DNA, 1170 bp, Glycine max
atggttagcgtagctgagatcaggcaggcacaaagggcagaaggcccagcaaccatccttgccattggaactgcaaacccaccaaaccgtgttgatcagagcacctatcctgattactacttcagaatcaccaacagtgaccacatgaccgagctcaaagagaaatttcagcgcatgtgtgacaagtctatgatcaagacgagatatatgtacctaaacgaagagatcttgaaagagaatccaaacatgtgtgcttacatggcaccttctttggatgctaggcaagacatggtggtggtagaggtaccaaagctagggaaagaggctgcagtaaaggccataaaggagtggggccagccaaagtcaaagattacccacttgatcttctgcaccactagcggtgtggacatgcctggtgctgattaccaactcaccaaacaattgggccttcgcccttatgtgaagaggtacatgatgtaccaacaaggttgctttgcaggtggcacggttcttcgtttggccaaggatttggctgagaacaacaagggtgcacgtgtgcttgttgtctgctctgagatcactgcagtcacattccgtgggccaagtgacactcaccttgatagtcttgtgggccaagcattgtttggagatggagctgctgcagtcattgttggttctgacccaattccacaagttgagaagcctttgtatgagcttgtttggactgcacaaacaattgctccagacagtgaaggtgctattgatggacaccttcgtgaagttggactcacatttcacctcctcaaggatgttcccgggattgtctcaaagaacattgataaggcactttttgaggctttcaacccattgaacatctctgattacaactccatcttttggattgcacaccctggtgggcctgcgattttagaccaagttgagcaaaagttgggtctcaaacctgagaagatgaaggccactagagatgtgcttagtgaatatgggaacatgtcaagtgcttgtgttcttttcatcttggatgagatgaggaggaaatctgctgaaaatggacataaaaccacaggtgaaggacttgaatggggtgtgttgttcggttttggacctggacttaccattgaaactgttgttttgcatagtgtggccatctga

SEQ ID NO: 222 - protein, 389 aa, Glycine max
MVSVAEIRQAQRAEGPATILAIGTANPPNRVDQSTYPDYYFRITNSDHMTELKEKFQRMCDKSMIKTRYMYLNEEILKENPNMCAYMAPSLDARQDMVVVEVPKLGKEAAVKAIKEWGQPKSKITHLIFCTTSGVDMPGADYQLTKQLGLRPYVKRYMMYQQGCFAGGTVLRLAKDLAENNKGARVLVVCSEITAVTFRGPSDTHLDSLVGQALFGDGAAAVIVGSDPIPQVEKPLYELVWTAQTIAPDSEGAIDGHLREVGLTFHLLKDVPGIVSKNIDKALFEAFNPLNISDYNSIFWIAHPGGPAILDQVEQKLGLKPEKMKATRDVLSEYGNMSSACVLFILDEMRRKSAENGHKTTGEGLEWGVLFGFGPGLTIETVVLHSVAI

SEQ ID NO: 223 - DNA, 20 bp, Glycine max
atgagcatacattattatta

SEQ ID NO: 224 - DNA, 20 bp, Glycine max
atattataaatgtttttaat

SEQ ID NO: 225 - DNA, 20 bp, Glycine max
catacatgtactaattatat

SEQ ID NO: 226 - DNA, 20 bp, Glycine max
ttattattttttatattcga

SEQ ID NO: 227 - DNA, 20 bp, Glycine max
ctactatatgttttattgga

SEQ ID NO: 228 - DNA, 20 bp, Glycine max
atgtctactatatgttttat

SEQ ID NO: 229 - DNA, 20 bp, Glycine max
ttacacttgcaaattccaat

SEQ ID NO: 230 - DNA, 20 bp, Glycine max
gtggttgacttctgaccaat

SEQ ID NO: 231 - DNA, 20 bp, Glycine max
tcagaagtcaaccacatgtt

SEQ ID NO: 232 - DNA, 20 bp, Glycine max
cataaaaaaaaccaaacatg

SEQ ID NO: 233 - DNA, 20 bp, Glycine max
cacatgtttggtttttttta

SEQ ID NO: 234 - DNA, 20 bp, Glycine max
tctaccccatgcatcaactt

SEQ ID NO: 235 - DNA, 20 bp, Glycine max
atctaccccatgcatcaact

SEQ ID NO: 236 - DNA, 20 bp, Glycine max
tggatacccaagttgatgca

SEQ ID NO: 237 - DNA, 20 bp, Glycine max
ggatacccaagttgatgcat

SEQ ID NO: 238 - DNA, 20 bp, Glycine max
gatacccaagttgatgcatg

SEQ ID NO: 239 - DNA, 20 bp, Glycine max
ttattttcaggcaataattg

SEQ ID NO: 240 - DNA, 20 bp, Glycine max
tttattttcaggcaataatt

SEQ ID NO: 241 - DNA, 20 bp, Glycine max
ttttattttcaggcaataat

SEQ ID NO: 242 - DNA, 20 bp, Glycine max
ctatttattattttattttc

SEQ ID NO: 243 - DNA, 20 bp, Glycine max
ctgaaaataaaataataaat

SEQ ID NO: 244 - DNA, 20 bp, Glycine max
tgaaaataaaataataaata

SEQ ID NO: 245 - DNA, 20 bp, Glycine max
gaaaataaaataataaatag

SEQ ID NO: 246 - DNA, 20 bp, Glycine max
aaaataataaataggggtag

SEQ ID NO: 247 - DNA, 20 bp, Glycine max
ataataaataggggtagagg

SEQ ID NO: 248 - DNA, 20 bp, Glycine max
ggcggtgttgaaaaaacatg

SEQ ID NO: 249 - DNA, 20 bp, Glycine max
gcggtgttgaaaaaacatgc

SEQ ID NO: 250 - DNA, 20 bp, Glycine max
tatgtgacctatgagtttgg

SEQ ID NO: 251 - DNA, 20 bp, Glycine max
tagtatgtgacctatgagtt

SEQ ID NO: 252 - DNA, 20 bp, Glycine max
gcatatgccaccaaactcat

SEQ ID NO: 253 - DNA, 20 bp, Glycine max
taacaagcagtcatagtaaa

SEQ ID NO: 254 - DNA, 20 bp, Glycine max
caagcagtcatagtaaacgg

SEQ ID NO: 255 - DNA, 20 bp, Glycine max
ggaaaatatgttcgtgtgta

SEQ ID NO: 256 - DNA, 20 bp, Glycine max
gagagagtggatgggagggt

SEQ ID NO: 257 - DNA, 20 bp, Glycine max
tagggagagagtggatggga

SEQ ID NO: 258 - DNA, 20 bp, Glycine max
gtagggagagagtggatggg

SEQ ID NO: 259 - DNA, 20 bp, Glycine max
tatgtagggagagagtggat

SEQ ID NO: 260 - DNA, 20 bp, Glycine max
atatgtagggagagagtgga

SEQ ID NO: 261 - DNA, 20 bp, Glycine max
atatatatgtagggagagag

SEQ ID NO: 262 - DNA, 20 bp, Glycine max
tagcatcttatatatatgta

SEQ ID NO: 263 - DNA, 20 bp, Glycine max
atagcatcttatatatatgt

SEQ ID NO: 264 - DNA, 20 bp, Glycine max
ctgtggtttgaagttgctta

SEQ ID NO: 265 - DNA, 20 bp, Glycine max
gctgtggtttgaagttgctt

SEQ ID NO: 266 - DNA, 20 bp, Glycine max
tagtagagagaattaagctg

SEQ ID NO: 267 - DNA, 20 bp, Glycine max
tgagttcaatcaaatcgcat

SEQ ID NO: 268 - DNA, 20 bp, Glycine max
tcgcattggtatctgaaatc

SEQ ID NO: 269 - DNA, 20 bp, Glycine max
gtatctgaaatcaggaaaga

SEQ ID NO: 270 - DNA, 20 bp, Glycine max
tggttagcgtagctgagatc

SEQ ID NO: 271 - DNA, 20 bp, Glycine max
tagcgtagctgagatcaggc

SEQ ID NO: 272 - DNA, 20 bp, Glycine max
ctgagatcaggcaggcacaa

SEQ ID NO: 273 - DNA, 20 bp, Glycine max
tgagatcaggcaggcacaaa

SEQ ID NO: 274 - DNA, 20 bp, Glycine max
aggcaggcacaaagggcaga

SEQ ID NO: 275 - DNA, 20 bp, Glycine max
caatggcaaggatggttgct

SEQ ID NO: 276 - DNA, 20 bp, Glycine max
ccaatggcaaggatggttgc

SEQ ID NO: 277 - DNA, 20 bp, Glycine max
tgcagttccaatggcaagga

SEQ ID NO: 278 - DNA, 20 bp, Glycine max
ccagcaaccatccttgccat

SEQ ID NO: 279 - DNA, 20 bp, Glycine max
ggtttgcagttccaatggca

SEQ ID NO: 280 - DNA, 20 bp, Glycine max
tggtgggtttgcagttccaa

SEQ ID NO: 281 - DNA, 20 bp, Glycine max
tctgatcaacacggtttggt

SEQ ID NO: 282 - DNA, 20 bp, Glycine max
ctctgatcaacacggtttgg

SEQ ID NO: 283 - DNA, 20 bp, Glycine max
gtgctctgatcaacacggtt

SEQ ID NO: 284 - DNA, 20 bp, Glycine max
gataggtgctctgatcaaca

SEQ ID NO: 285 - DNA, 20 bp, Glycine max
tctgaagtagtaatcaggat

SEQ ID NO: 286 - DNA, 20 bp, Glycine max
gtgattctgaagtagtaatc

SEQ ID NO: 287 - DNA, 20 bp, Glycine max
ctcggtcatgtggtcactgt

SEQ ID NO: 288 - DNA, 20 bp, Glycine max
tctctttgagctcggtcatg

SEQ ID NO: 289 - DNA, 20 bp, Glycine max
ctgaaatttctctttgagct

SEQ ID NO: 290 - DNA, 20 bp, Glycine max
gaaaaattaagatgagagta

SEQ ID NO: 291 - DNA, 20 bp, Glycine max
ttttgtagaagtgagaaata

SEQ ID NO: 292 - DNA, 20 bp, Glycine max
gttatttgtataaattaaaa

SEQ ID NO: 293 - DNA, 20 bp, Glycine max
acaaataacacttgttaatt

SEQ ID NO: 294 - DNA, 20 bp, Glycine max
aataaataaataaatctaat

SEQ ID NO: 295 - DNA, 20 bp, Glycine max
ataaataaataaatctaatt

SEQ ID NO: 296 - DNA, 20 bp, Glycine max
attgggtgcaaatattaaaa

SEQ ID NO: 297 - DNA, 20 bp, Glycine max
caaatattaaaatggcatca

SEQ ID NO: 298 - DNA, 20 bp, Glycine max
tagttaaaaattaaattgat

SEQ ID NO: 299 - DNA, 20 bp, Glycine max
ttttttttttttttttgaaa

SEQ ID NO: 300 - DNA, 20 bp, Glycine max
cttttttttttttttttgaa

SEQ ID NO: 301 - DNA, 20 bp, Glycine max
ttcaaaaaaaaaaaaaaaag

SEQ ID NO: 302 - DNA, 20 bp, Glycine max
aaagaggtgataattcgtta

SEQ ID NO: 303 - DNA, 20 bp, Glycine max
tttctttatgactaattttc

SEQ ID NO: 304 - DNA, 20 bp, Glycine max
ctttcaagatctcttcgttt

SEQ ID NO: 305 - DNA, 20 bp, Glycine max
gccatgtaagcacacatgtt

SEQ ID NO: 306 - DNA, 20 bp, Glycine max
tccaaacatgtgtgcttaca

SEQ ID NO: 307 - DNA, 20 bp, Glycine max
tgcttacatggcaccttctt

SEQ ID NO: 308 - DNA, 20 bp, Glycine max
tcttgcctagcatccaaaga

SEQ ID NO: 309 - DNA, 20 bp, Glycine max
tggcaccttctttggatgct

SEQ ID NO: 310 - DNA, 20 bp, Glycine max
tttggatgctaggcaagaca

SEQ ID NO: 311 - DNA, 20 bp, Glycine max
ggatgctaggcaagacatgg

SEQ ID NO: 312 - DNA, 20 bp, Glycine max
tgctaggcaagacatggtgg

SEQ ID NO: 313 - DNA, 20 bp, Glycine max
gcaagacatggtggtggtag

SEQ ID NO: 314 - DNA, 20 bp, Glycine max
gtggtagaggtaccaaagct

SEQ ID NO: 315 - DNA, 20 bp, Glycine max
tggtagaggtaccaaagcta

SEQ ID NO: 316 - DNA, 20 bp, Glycine max
gcagcctctttccctagctt

SEQ ID NO: 317 - DNA, 20 bp, Glycine max
ggtaccaaagctagggaaag

SEQ ID NO: 318 - DNA, 20 bp, Glycine max
agggaaagaggctgcagtaa

SEQ ID NO: 319 - DNA, 20 bp, Glycine max
ggctgcagtaaaggccataa

SEQ ID NO: 320 - DNA, 20 bp, Glycine max
tggctggccccactccttta

SEQ ID NO: 321 - DNA, 20 bp, Glycine max
cagtaaaggccataaaggag

SEQ ID NO: 322 - DNA, 20 bp, Glycine max
agtaaaggccataaaggagt

SEQ ID NO: 323 - DNA, 20 bp, Glycine max
gtaaaggccataaaggagtg

SEQ ID NO: 324 - DNA, 20 bp, Glycine max
gggtaatctttgactttggc

SEQ ID NO: 325 - DNA, 20 bp, Glycine max
aagtgggtaatctttgactt

SEQ ID NO: 326 - DNA, 20 bp, Glycine max
agtggtgcagaagatcaagt

SEQ ID NO: 327 - DNA, 20 bp, Glycine max
tagtggtgcagaagatcaag

SEQ ID NO: 328 - DNA, 20 bp, Glycine max
ttgatcttctgcaccactag

SEQ ID NO: 329 - DNA, 20 bp, Glycine max
aggcatgtccacaccgctag

SEQ ID NO: 330 - DNA, 20 bp, Glycine max
cttctgcaccactagcggtg

SEQ ID NO: 331 - DNA, 20 bp, Glycine max
actagcggtgtggacatgcc

SEQ ID NO: 332 - DNA, 20 bp, Glycine max
gtgagttggtaatcagcacc

SEQ ID NO: 333 - DNA, 20 bp, Glycine max
ggcccaattgtttggtgagt

SEQ ID NO: 334 - DNA, 20 bp, Glycine max
ttaccaactcaccaaacaat

SEQ ID NO: 335 - DNA, 20 bp, Glycine max
agggcgaaggcccaattgtt

SEQ ID NO: 336 - DNA, 20 bp, Glycine max
taccaactcaccaaacaatt

SEQ ID NO: 337 - DNA, 20 bp, Glycine max
acctcttcacataagggcga

SEQ ID NO: 338 - DNA, 20 bp, Glycine max
tcatgtacctcttcacataa

SEQ ID NO: 339 - DNA, 20 bp, Glycine max
atcatgtacctcttcacata

SEQ ID NO: 340 - DNA, 20 bp, Glycine max
gccttcgcccttatgtgaag

SEQ ID NO: 341 - DNA, 20 bp, Glycine max
aggtacatgatgtaccaaca

SEQ ID NO: 342 - DNA, 20 bp, Glycine max
cacctgcaaagcaaccttgt

SEQ ID NO: 343 - DNA, 20 bp, Glycine max
taccaacaaggttgctttgc

SEQ ID NO: 344 - DNA, 20 bp, Glycine max
caacaaggttgctttgcagg

SEQ ID NO: 345 - DNA, 20 bp, Glycine max
aggttgctttgcaggtggca

SEQ ID NO: 346 - DNA, 20 bp, Glycine max
aggtggcacggttcttcgtt

SEQ ID NO: 347 - DNA, 20 bp, Glycine max
cacggttcttcgtttggcca

SEQ ID NO: 348 - DNA, 20 bp, Glycine max
tcttcgtttggccaaggatt

SEQ ID NO: 349 - DNA, 20 bp, Glycine max
gttgttctcagccaaatcct

SEQ ID NO: 350 - DNA, 20 bp, Glycine max
ggatttggctgagaacaaca

SEQ ID NO: 351 - DNA, 20 bp, Glycine max
gatttggctgagaacaacaa

SEQ ID NO: 352 - DNA, 20 bp, Glycine max
atcactgcagtcacattccg

SEQ ID NO: 353 - DNA, 20 bp, Glycine max
tcactgcagtcacattccgt

SEQ ID NO: 354 - DNA, 20 bp, Glycine max
ggtgagtgtcacttggccca

SEQ ID NO: 355 - DNA, 20 bp, Glycine max
ctatcaaggtgagtgtcact

SEQ ID NO: 356 - DNA, 20 bp, Glycine max
cttggcccacaagactatca

SEQ ID NO: 357 - DNA, 20 bp, Glycine max
cactcaccttgatagtcttg

SEQ ID NO: 358 - DNA, 20 bp, Glycine max
actcaccttgatagtcttgt

SEQ ID NO: 359 - DNA, 20 bp, Glycine max
ctccatctccaaacaatgct

SEQ ID NO: 360 - DNA, 20 bp, Glycine max
cttgtgggccaagcattgtt

SEQ ID NO: 361 - DNA, 20 bp, Glycine max
ggccaagcattgtttggaga

SEQ ID NO: 362 - DNA, 20 bp, Glycine max
ggagctgctgcagtcattgt

SEQ ID NO: 363 - DNA, 20 bp, Glycine max
gcttctcaacttgtggaatt

SEQ ID NO: 364 - DNA, 20 bp, Glycine max
ggcttctcaacttgtggaat

SEQ ID NO: 365 - DNA, 20 bp, Glycine max
tacaaaggcttctcaacttg

SEQ ID NO: 366 - DNA, 20 bp, Glycine max
gtccaaacaagctcatacaa

SEQ ID NO: 367 - DNA, 20 bp, Glycine max
agcctttgtatgagcttgtt

SEQ ID NO: 368 - DNA, 20 bp, Glycine max
tcaatagcaccttcactgtc

SEQ ID NO: 369 - DNA, 20 bp, Glycine max
acaattgctccagacagtga

SEQ ID NO: 370 - DNA, 20 bp, Glycine max
gacagtgaaggtgctattga

SEQ ID NO: 371 - DNA, 20 bp, Glycine max
atgtgagtccaacttcacga

SEQ ID NO: 372 - DNA, 20 bp, Glycine max
gatggacaccttcgtgaagt

SEQ ID NO: 373 - DNA, 20 bp, Glycine max
actcacatttcacctcctca

SEQ ID NO: 374 - DNA, 20 bp, Glycine max
tcccgggaacatccttgagg

SEQ ID NO: 375 - DNA, 20 bp, Glycine max
caatcccgggaacatccttg

SEQ ID NO: 376 - DNA, 20 bp, Glycine max
cacctcctcaaggatgttcc

SEQ ID NO: 377 - DNA, 20 bp, Glycine max
acctcctcaaggatgttccc

SEQ ID NO: 378 - DNA, 20 bp, Glycine max
atgttctttgagacaatccc

SEQ ID NO: 379 - DNA, 20 bp, Glycine max
aatgttctttgagacaatcc

SEQ ID NO: 380 - DNA, 20 bp, Glycine max
tgtctcaaagaacattgata

SEQ ID NO: 381 - DNA, 20 bp, Glycine max
cattgataaggcactttttg

SEQ ID NO: 382 - DNA, 20 bp, Glycine max
tgtaatcagagatgttcaat

SEQ ID NO: 383 - DNA, 20 bp, Glycine max
ttgtaatcagagatgttcaa

SEQ ID NO: 384 - DNA, 20 bp, Glycine max
ctgattacaactccatcttt

SEQ ID NO: 385 - DNA, 20 bp, Glycine max
agggtgtgcaatccaaaaga

SEQ ID NO: 386 - DNA, 20 bp, Glycine max
atcttttggattgcacaccc

SEQ ID NO: 387 - DNA, 20 bp, Glycine max
ttttggattgcacaccctgg

SEQ ID NO: 388 - DNA, 20 bp, Glycine max
tttggattgcacaccctggt

SEQ ID NO: 389 - DNA, 20 bp, Glycine max
ctaaaatcgcaggcccacca

SEQ ID NO: 390 - DNA, 20 bp, Glycine max
tctaaaatcgcaggcccacc

SEQ ID NO: 391 - DNA, 20 bp, Glycine max
tcaacttggtctaaaatcgc

SEQ ID NO: 392 - DNA, 20 bp, Glycine max
gacccaacttttgctcaact

SEQ ID NO: 393 - DNA, 20 bp, Glycine max
agaccaagttgagcaaaagt

SEQ ID NO: 394 - DNA, 20 bp, Glycine max
gaccaagttgagcaaaagtt

SEQ ID NO: 395 - DNA, 20 bp, Glycine max
ctagtggccttcatcttctc

SEQ ID NO: 396 - DNA, 20 bp, Glycine max
tctcaaacctgagaagatga

SEQ ID NO: 397 - DNA, 20 bp, Glycine max
ttcactaagcacatctctag

SEQ ID NO: 398 - DNA, 20 bp, Glycine max
agagatgtgcttagtgaata

SEQ ID NO: 399 - DNA, 20 bp, Glycine max
gagatgtgcttagtgaatat

SEQ ID NO: 400 - DNA, 20 bp, Glycine max
tgcttgtgttcttttcatct

SEQ ID NO: 401 - DNA, 20 bp, Glycine max
ttttcatcttggatgagatg

SEQ ID NO: 402 - DNA, 20 bp, Glycine max
tcatcttggatgagatgagg

SEQ ID NO: 403 - DNA, 20 bp, Glycine max
aggaggaaatctgctgaaaa

SEQ ID NO: 404 - DNA, 20 bp, Glycine max
gaaaatggacataaaaccac

SEQ ID NO: 405 - DNA, 20 bp, Glycine max
ccattcaagtccttcacctg

SEQ ID NO: 406 - DNA, 20 bp, Glycine max
ggacataaaaccacaggtga

SEQ ID NO: 407 - DNA, 20 bp, Glycine max
ccacaggtgaaggacttgaa

SEQ ID NO: 408 - DNA, 20 bp, Glycine max
cacaggtgaaggacttgaat

SEQ ID NO: 409 - DNA, 20 bp, Glycine max
acaggtgaaggacttgaatg

SEQ ID NO: 410 - DNA, 20 bp, Glycine max
cttgaatggggtgtgttgtt

SEQ ID NO: 411 - DNA, 20 bp, Glycine max
tggggtgtgttgttcggttt

SEQ ID NO: 412 - DNA, 20 bp, Glycine max
gtgttgttcggttttggacc

SEQ ID NO: 413 - DNA, 20 bp, Glycine max
acagtttcaatggtaagtcc

SEQ ID NO: 414 - DNA, 20 bp, Glycine max
atgcaaaacaacagtttcaa

SEQ ID NO: 415 - DNA, 20 bp, Glycine max
aactgttgttttgcatagtg

SEQ ID NO: 416 - DNA, 20 bp, Glycine max
aatatatgaggcatctcaga

SEQ ID NO: 417 - DNA, 20 bp, Glycine max
caataatgaaataatatatg

SEQ ID NO: 418 - DNA, 20 bp, Glycine max
ccccaagcaagtttgaaaag

SEQ ID NO: 419 - DNA, 20 bp, Glycine max
taccacttttcaaacttgct

SEQ ID NO: 420 - DNA, 20 bp, Glycine max
accacttttcaaacttgctt

SEQ ID NO: 421 - DNA, 20 bp, Glycine max
ccacttttcaaacttgcttg

SEQ ID NO: 422 - DNA, 20 bp, Glycine max
aacgagttttttttttttgg

SEQ ID NO: 423 - DNA, 20 bp, Glycine max
ctaaacgagttttttttttt

SEQ ID NO: 424 - DNA, 20 bp, Glycine max
ttaaaataataatacgtgtt

SEQ ID NO: 425 - DNA, 20 bp, Glycine max
aaataataatacgtgtttgg

SEQ ID NO: 426 - DNA, 20 bp, Glycine max
aatgcctgttattgataatt

SEQ ID NO: 427 - DNA, 20 bp, Glycine max
ttagcctaattatcaataac

SEQ ID NO: 428 - DNA, 20 bp, Glycine max
tcaaatatcgctagcaaaca

SEQ ID NO: 429 - DNA, 20 bp, Glycine max
ttaaataatcgaaaaaaatg

SEQ ID NO: 430 - DNA, 20 bp, Glycine max
caaattgactatcgatcatt

SEQ ID NO: 431 - DNA, 20 bp, Glycine max
aaattgactatcgatcattt

SEQ ID NO: 432 - DNA, 20 bp, Glycine max
ttttcagtccaaataaacgg

SEQ ID NO: 433 - DNA, 20 bp, Glycine max
gggttatgccgccgtttatt

SEQ ID NO: 434 - DNA, 20 bp, Glycine max
ccattttcagtccaaataaa

SEQ ID NO: 435 - DNA, 20 bp, Glycine max
ccgtttatttggactgaaaa

SEQ ID NO: 436 - DNA, 20 bp, Glycine max
cgtttatttggactgaaaat

SEQ ID NO: 437 - DNA, 20 bp, Glycine max
taagttgaaaaaacaagagt

SEQ ID NO: 438 - DNA, 20 bp, Glycine max
tggtatatatgtcttgcatt

SEQ ID NO: 439 - DNA, 20 bp, Glycine max
tatgtcttgcatttggactc

SEQ ID NO: 440 - DNA, 20 bp, Glycine max
attacgtagtcgaaaagcgt

SEQ ID NO: 441 - DNA, 20 bp, Glycine max
aatctttcttacggagtcat

SEQ ID NO: 442 - DNA, 20 bp, Glycine max
gcgtcttcgaatctttctta

SEQ ID NO: 443 - DNA, 20 bp, Glycine max
gcatgatttacttttctccc

SEQ ID NO: 444 - DNA, 20 bp, Glycine max
catgatttacttttctccct

SEQ ID NO: 445 - DNA, 20 bp, Glycine max
gatttacttttctccctggg

SEQ ID NO: 446 - DNA, 20 bp, Glycine max
ttgtgtcagttggccaccca

SEQ ID NO: 447 - DNA, 20 bp, Glycine max
cttgtgtcagttggccaccc

SEQ ID NO: 448 - DNA, 20 bp, Glycine max
agaaggcaacttgtgtcagt

SEQ ID NO: 449 - DNA, 20 bp, Glycine max
acccatttgcataagagaga

SEQ ID NO: 450 - DNA, 20 bp, Glycine max
tgccttctctcttatgcaaa

SEQ ID NO: 451 - DNA, 20 bp, Glycine max
gccttctctcttatgcaaat

SEQ ID NO: 452 - DNA, 20 bp, Glycine max
acaaatatccaaagtagaaa

SEQ ID NO: 453 - DNA, 20 bp, Glycine max
gtgtgtttccttttctactt

SEQ ID NO: 454 - DNA, 4566 bp, Glycine max
tcatgtgttagagtgttattgtcatgtgttagttacactctgttgttcgttttcccgtagatgagggttagtttggtaaataattaagagatctattgttttatgtgattttttttagacaaaattatatttttggttctcttagttgtctctaattttaattttaatttttttctaaatttatttatgaatttagtttctaatgatgtaaaatcacgtgcaaatgtgattttcaagccaaatctaaacattgatcatcacttatcacgtttttttgagtgaagacagttaacatacatttttttgtgtcagtttaaatctaaacttgaaaatcacatttacaaaatttgataaactggatgactaaattcataaataaatttaaagaaggattaaaatcaaaataaaaaataattaaaaggataaaaaatacaattttactttagtgacatcttaacttacgagttataatatatatatatactaacaataccatggttgccaaatcccatttccaagtcataattctatttcttctttcattattatacattacatccagctatactcatacacaggctgattttgacaaatgggtatcaaggaatgtcaagaattatcagaaaaggaacattttggaagccaaattgaaagtcgctgcacctggtccagatttgaagctgacgcaggctgagaataacaaagttagcataagatcgagttagccaagatggtactggtgacttcaagaccattacagaagctcttaatagcattccaccacgcaacacaaggagagttatagtatcgatcgcaccgggtgtttataggtactacgttacagtctcatctatataatatatatataatttcgtgaaaagatatatatttcattaattttaaaaatctcttacattattttatatagtagctactcatattcatataagtcacaacattgaattgaaattaattgtttagggagaaggtgatgatccccaaaacattgccttttattacattgttaggggacgccggggatccaccaaccattaccggaaatgatacagcatctgtctccggaaggacgttccagagtgcaactgtggtgtagatgcgagccattttgtggccatcaacataaaatttgaggtatgcacgcaaacttctttaattaatgctaaaatgacgtttcattaattttaattctattgataactaatttcaattaaagaatttgactcatcattagtcagatttttttttttcattcatatttttttttctttatagctcagattaacgatttatttattgattgatgatgcattttattaaaaaataaattgatagatatcaatatgaatacaatattgcaatttttgtctctaagaaaaaaattggtatcagtatccacgatcaggccagtgtgatcaccttcaaaaaaaatattattataaaaacattaaggttaattataaaaaatagaatttacacggtatacaaaaattcacacagtcagtatattctaattaaattataaaatgtaacaaaatgaaaaattttagttaattaaaagtaaaatgaaacgtaaaataaacaaataaacatacatttgtgttcacacaaacgtatatgtatcgcataaaaaaacacaaacgtatttttttttacagtatttttttacatctcacacacaaacgtattttttttaatgagttaatcatttttttatgagtcacacacacaaacgtatataagatttaacgagagttagtttcatttcacatgtgaatgagaaaaataaatatcaattattagattttatcataaatgattaaaattaaaatattagactaaatctagaaattttcacataatttaatattttatcaattaactttatctcaaaatacaatatactttttagaatataagtaaatgttggtattaattatttatctaaaattttacatagattttatcacatgattcgacagttggatttgtaaacctttaaatttagaagaaaaaaagctattaagagagtaaaaaaaaacttatactctcatattaagttgattcatatattaatatataatatatggatttgtgaacttacatcttttataattatttagaaggaatatgtaaatctgaataaaaaagaaaattctgaataaagaaagaatggatattttaataagtaataattataattttttaaaatatattaaatgtgtagttcggtaacgtacttgaaaattctgttaataatccataattgttattttggagttaatttaaaaagaagagagcaaacaaacgaacatagagatttcactaaaacatatataatttttaacaatatttttttgtttaataactattaaaaaagttactaaaagtttttgatcaaatatgaataaatgtttgtgatattttatgaagtgtataattcatatatacagtgaaaatatgaaatggaaaaaaataattttgttggtggaggatggtaaattattgtgtgcatgctaaaacagaatagtggtccgcatgtaattggaaggaagggagaagaagcatctcaggaagcaaagctggtttctacaattgcagtttctagggatctcaagacactctctatgatcacaaaggccttcattacttcaacaactgctctattcaaggtccctttaccaggtcttctttatgttttttagcactgcaattctagcccaatatgcctcccggcccaatcaaacttactcatcatcattttattattttcttaagaaataattagctacactatgtataaattttttatttcattttttaaacatattctttattgttagagtttaattgttacacataattagtgtaatgtaaacaaaaaaaatcagtctaaaacattttacactatcagtccattaaaaataatcattactatgacttttaaaataattattataaaaatcaataaatttattatatataatagtatataattaaataataatataaaattaagttatattattaatcataatttattttattattattattattattatcttctgaagtttacttaaaaaatgcaaaattttgttaaccccacttgccttttttttttttttttgataaatttcactcataattttacactaccaagtattaatagtaaaaatatgttaaaaatattgtgttagataatgtatggatgttacaccatttactcttctattttcatactagcatgaacttttgttggttagttaatttaccattggtaagttttttattgaattggcaagcagaattgctatctaaattccacaaccaggaaggtggcttccatcactgctcaaaagcgtaccaattcgtcattggagagtggattctcattcaaaaactgcacagtaataggtagtgggcaggtttatctcggaagagcatggggagattattccagagttgttttctcttacaccttcatggacaacatagttctcgccaaaggatggagtgattggggtgaccaaaagcgtgactcgttagttcaatattacatcgcaccacacttggaatcctacgttttcttaatacaaaattacataatgaagggttaattttgtgtttcattggtttgtgtattaatttcaggagagtatattatggagaatacaagtgtagtggaccaggagctaacttggctggaagagtgccatggacacgggtgcttacggatgaagaggccaagccttttattgagatgcaattcattgaaggggacacttggcttattagcccctaaacaattataaattattagatgcttcagaatcatccataatctcaatcaataatcatactcagacgatacctaagcaacatataaaaataaaaagatggagacttgaaaattatgttataaatttaatatgtatttacaaattaataataccctatttctgaattttcgctattcatcaatgctagattatttacaaataatcgtttacgttgctctaattaactactagaaaataagagcactacattcattcatgtatgtcgcaccaagccttgttgcttacattacatgtgttccttaatgtttaatactgtttatgatggaataaagaccaatgttagcacaatgaaacaccacacgcgtgcgcaatgctaattaaaccagctttatacccatcaatgtacggaaaagaaaagcattaaattttatcttctagcttgtgagatatgaattgacaacatgatgtagcaagagtaaccaagaaacacaaacataatgtagtagaataagacagggaagataattttaaggccaaatgcaacactcagctaatttccagtgtttggtctactctatgtgatcactgaagaaactccagaagccatcaaggttgtccatgcctatggatgctttcccagctggtttcttcacctcaataatgtgtgtcaagtcttttgtctctttttctttccacgttggactctgtggcacaagttcatggtgacaacatcttatcaaggctt

SEQ ID NO: 455 - DNA, 810 bp, Glycine max
atggttgccaaatcccatttccaagtcataattctatttcttctttcattattatacattacatccagctatactcatacacaggctgattttgacaaatgggtatcaaggaatgtcaagaattatcagaaaaggaacattttggaagccaaattgaaagtcgctgcacctggtccagatttgaagctgacgcaggctgagaataacaaaaccattacagaagctcttaatagcattccaccacgcaacacaaggagagttatagtatcgatcgcaccgggtgtttatagcatctgtctccggaaggacgttccagagtgcaactgtggtgtagatgcgagccattttgtggccatcaacataaaatttgagggatctcaagacactctctatgatcacaaaggccttcattacttcaacaactgctctattcaaggtccctttaccaggaaggtggcttccatcactgctcaaaagcgtaccaattcgtcattggagagtggattctcattcaaaaactgcacagtaataggtagtgggcaggtttatctcggaagagcatggggagattattccagagttgttttctcttacaccttcatggacaacatagttctcgccaaaggatggagtgattggggtgaccaaaagcgtgactcgagagtatattatggagaatacaagtgtagtggaccaggagctaacttggctggaagagtgccatggacacgggtgcttacggatgaagaggccaagccttttattgagatgcaattcattgaaggggacacttggcttattagcccctaa

SEQ ID NO: 456 - protein, 269 aa, Glycine max
MVAKSHFQVIILFLLSLLYITSSYTHTQADFDKWVSRNVKNYQKRNILEAKLKVAAPGPDLKLTQAENNKTITEALNSIPPRNTRRVIVSIAPGVYSICLRKDVPECNCGVDASHFVAINIKFEGSQDTLYDHKGLHYFNNCSIQGPFTRKVASITAQKRTNSSLESGFSFKNCTVIGSGQVYLGRAWGDYSRVVFSYTFMDNIVLAKGWSDWGDQKRDSRVYYGEYKCSGPGANLAGRVPWTRVLTDEEAKPFIEMQFIEGDTWLISP

SEQ ID NO: 457 - DNA, 20 bp, Glycine max
ccaaactaaccctcatctac

SEQ ID NO: 458 - DNA, 20 bp, Glycine max
tgttcgttttcccgtagatg

SEQ ID NO: 459 - DNA, 20 bp, Glycine max
accaaactaaccctcatcta

SEQ ID NO: 460 - DNA, 20 bp, Glycine max
gttcgttttcccgtagatga

SEQ ID NO: 461 - DNA, 20 bp, Glycine max
cccgtagatgagggttagtt

SEQ ID NO: 462 - DNA, 20 bp, Glycine max
tttagacaaaattatatttt

SEQ ID NO: 463 - DNA, 20 bp, Glycine max
tgatgatcaatgtttagatt

SEQ ID NO: 464 - DNA, 20 bp, Glycine max
atttacaaaatttgataaac

SEQ ID NO: 465 - DNA, 20 bp, Glycine max
ttcataaataaatttaaaga

SEQ ID NO: 466 - DNA, 20 bp, Glycine max
caaaataaaaaataattaaa

SEQ ID NO: 467 - DNA, 20 bp, Glycine max
tatatatactaacaatacca

SEQ ID NO: 468 - DNA, 20 bp, Glycine max
gaaatgggatttggcaacca

SEQ ID NO: 469 - DNA, 20 bp, Glycine max
tatgacttggaaatgggatt

SEQ ID NO: 470 - DNA, 20 bp, Glycine max
tagaattatgacttggaaat

SEQ ID NO: 471 - DNA, 20 bp, Glycine max
atagaattatgacttggaaa

SEQ ID NO: 472 - DNA, 20 bp, Glycine max
gaagaaatagaattatgact

SEQ ID NO: 473 - DNA, 20 bp, Glycine max
agcctgtgtatgagtatagc

SEQ ID NO: 474 - DNA, 20 bp, Glycine max
atccagctatactcatacac

SEQ ID NO: 475 - DNA, 20 bp, Glycine max
cacaggctgattttgacaaa

SEQ ID NO: 476 - DNA, 20 bp, Glycine max
acaggctgattttgacaaat

SEQ ID NO: 477 - DNA, 20 bp, Glycine max
attttgacaaatgggtatca

SEQ ID NO: 478 - DNA, 20 bp, Glycine max
atgtcaagaattatcagaaa

SEQ ID NO: 479 - DNA, 20 bp, Glycine max
ttatcagaaaaggaacattt

SEQ ID NO: 480 - DNA, 20 bp, Glycine max
aggtgcagcgactttcaatt

SEQ ID NO: 481 - DNA, 20 bp, Glycine max
aaattgaaagtcgctgcacc

SEQ ID NO: 482 - DNA, 20 bp, Glycine max
gtcagcttcaaatctggacc

SEQ ID NO: 483 - DNA, 20 bp, Glycine max
gcctgcgtcagcttcaaatc

SEQ ID NO: 484 - DNA, 20 bp, Glycine max
tccagatttgaagctgacgc

SEQ ID NO: 485 - DNA, 20 bp, Glycine max
taagatcgagttagccaaga

SEQ ID NO: 486 - DNA, 20 bp, Glycine max
tgaagtcaccagtaccatct

SEQ ID NO: 487 - DNA, 20 bp, Glycine max
cgagttagccaagatggtac

SEQ ID NO: 488 - DNA, 20 bp, Glycine max
gctattaagagcttctgtaa

SEQ ID NO: 489 - DNA, 20 bp, Glycine max
actctccttgtgttgcgtgg

SEQ ID NO: 490 - DNA, 20 bp, Glycine max
ataactctccttgtgttgcg

SEQ ID NO: 491 - DNA, 20 bp, Glycine max
gcattccaccacgcaacaca

SEQ ID NO: 492 - DNA, 20 bp, Glycine max
agttatagtatcgatcgcac

SEQ ID NO: 493 - DNA, 20 bp, Glycine max
gttatagtatcgatcgcacc

SEQ ID NO: 494 - DNA, 20 bp, Glycine max
acgtagtacctataaacacc

SEQ ID NO: 495 - DNA, 20 bp, Glycine max
cgatcgcaccgggtgtttat

SEQ ID NO: 496 - DNA, 20 bp, Glycine max
tgaattgaaattaattgttt

SEQ ID NO: 497 - DNA, 20 bp, Glycine max
gaattgaaattaattgttta

SEQ ID NO: 498 - DNA, 20 bp, Glycine max
aaattaattgtttagggaga

SEQ ID NO: 499 - DNA, 20 bp, Glycine max
taataaaaggcaatgttttg

SEQ ID NO: 500 - DNA, 20 bp, Glycine max
gtaataaaaggcaatgtttt

SEQ ID NO: 501 - DNA, 20 bp, Glycine max
tgtaataaaaggcaatgttt

SEQ ID NO: 502 - DNA, 20 bp, Glycine max
tcccctaacaatgtaataaa

SEQ ID NO: 503 - DNA, 20 bp, Glycine max
ttgccttttattacattgtt

SEQ ID NO: 504 - DNA, 20 bp, Glycine max
tgccttttattacattgtta

SEQ ID NO: 505 - DNA, 20 bp, Glycine max
gccttttattacattgttag

SEQ ID NO: 506 - DNA, 20 bp, Glycine max
attacattgttaggggacgc

SEQ ID NO: 507 - DNA, 20 bp, Glycine max
ttacattgttaggggacgcc

SEQ ID NO: 508 - DNA, 20 bp, Glycine max
tacattgttaggggacgccg

SEQ ID NO: 509 - DNA, 20 bp, Glycine max
ggtaatggttggtggatccc

SEQ ID NO: 510 - DNA, 20 bp, Glycine max
tcatttccggtaatggttgg

SEQ ID NO: 511 - DNA, 20 bp, Glycine max
gtatcatttccggtaatggt

SEQ ID NO: 512 - DNA, 20 bp, Glycine max
ggggatccaccaaccattac

SEQ ID NO: 513 - DNA, 20 bp, Glycine max
tgctgtatcatttccggtaa

SEQ ID NO: 514 - DNA, 20 bp, Glycine max
gacagatgctgtatcatttc

SEQ ID NO: 515 - DNA, 20 bp, Glycine max
aatgatacagcatctgtctc

SEQ ID NO: 516 - DNA, 20 bp, Glycine max
atacagcatctgtctccgga

SEQ ID NO: 517 - DNA, 20 bp, Glycine max
tgcactctggaacgtccttc

SEQ ID NO: 518 - DNA, 20 bp, Glycine max
tctacaccacagttgcactc

SEQ ID NO: 519 - DNA, 20 bp, Glycine max
gacgttccagagtgcaactg

SEQ ID NO: 520 - DNA, 20 bp, Glycine max
tgtagatgcgagccattttg

SEQ ID NO: 521 - DNA, 20 bp, Glycine max
ttatgttgatggccacaaaa

SEQ ID NO: 522 - DNA, 20 bp, Glycine max
tacctcaaattttatgttga

SEQ ID NO: 523 - DNA, 20 bp, Glycine max
ggccatcaacataaaatttg

SEQ ID NO: 524 - DNA, 20 bp, Glycine max
tttgtctctaagaaaaaaat

SEQ ID NO: 525 - DNA, 20 bp, Glycine max
tggtatcagtatccacgatc

SEQ ID NO: 526 - DNA, 20 bp, Glycine max
tgatcacactggcctgatcg

SEQ ID NO: 527 - DNA, 20 bp, Glycine max
ttttttgaaggtgatcacac

SEQ ID NO: 528 - DNA, 20 bp, Glycine max
tataataatattttttttga

SEQ ID NO: 529 - DNA, 20 bp, Glycine max
atattattataaaaacatta

SEQ ID NO: 530 - DNA, 20 bp, Glycine max
tataaaaaatagaatttaca

SEQ ID NO: 531 - DNA, 20 bp, Glycine max
tttagaatataagtaaatgt

SEQ ID NO: 532 - DNA, 20 bp, Glycine max
ttatcacatgattcgacagt

SEQ ID NO: 533 - DNA, 20 bp, Glycine max
tttttttcttctaaatttaa

SEQ ID NO: 534 - DNA, 20 bp, Glycine max
atatattaatatataatata

SEQ ID NO: 535 - DNA, 20 bp, Glycine max
atcttttataattatttaga

SEQ ID NO: 536 - DNA, 20 bp, Glycine max
aattctgaataaagaaagaa

SEQ ID NO: 537 - DNA, 20 bp, Glycine max
aatatattaaatgtgtagtt

SEQ ID NO: 538 - DNA, 20 bp, Glycine max
taactccaaaataacaatta

SEQ ID NO: 539 - DNA, 20 bp, Glycine max
ataatccataattgttattt

SEQ ID NO: 540 - DNA, 20 bp, Glycine max
tatacagtgaaaatatgaaa

SEQ ID NO: 541 - DNA, 20 bp, Glycine max
atggaaaaaaataattttgt

SEQ ID NO: 542 - DNA, 20 bp, Glycine max
gaaaaaaataattttgttgg

SEQ ID NO: 543 - DNA, 20 bp, Glycine max
aaaaataattttgttggtgg

SEQ ID NO: 544 - DNA, 20 bp, Glycine max
ataattttgttggtggagga

SEQ ID NO: 545 - DNA, 20 bp, Glycine max
tgcatgctaaaacagaatag

SEQ ID NO: 546 - DNA, 20 bp, Glycine max
cccttccttccaattacatg

SEQ ID NO: 547 - DNA, 20 bp, Glycine max
aatagtggtccgcatgtaat

SEQ ID NO: 548 - DNA, 20 bp, Glycine max
gtggtccgcatgtaattgga

SEQ ID NO: 549 - DNA, 20 bp, Glycine max
tccgcatgtaattggaagga

SEQ ID NO: 550 - DNA, 20 bp, Glycine max
ccgcatgtaattggaaggaa

SEQ ID NO: 551 - DNA, 20 bp, Glycine max
gaagggagaagaagcatctc

SEQ ID NO: 552 - DNA, 20 bp, Glycine max
agcatctcaggaagcaaagc

SEQ ID NO: 553 - DNA, 20 bp, Glycine max
tttctacaattgcagtttct

SEQ ID NO: 554 - DNA, 20 bp, Glycine max
ttctacaattgcagtttcta

SEQ ID NO: 555 - DNA, 20 bp, Glycine max
gacactctctatgatcacaa

SEQ ID NO: 556 - DNA, 20 bp, Glycine max
agcagttgttgaagtaatga

SEQ ID NO: 557 - DNA, 20 bp, Glycine max
ttcaacaactgctctattca

SEQ ID NO: 558 - DNA, 20 bp, Glycine max
ctattcaaggtccctttacc

SEQ ID NO: 559 - DNA, 20 bp, Glycine max
cataaagaagacctggtaaa

SEQ ID NO: 560 - DNA, 20 bp, Glycine max
acataaagaagacctggtaa

SEQ ID NO: 561 - DNA, 20 bp, Glycine max
taaaaaacataaagaagacc

SEQ ID NO: 562 - DNA, 20 bp, Glycine max
attgggccgggaggcatatt

SEQ ID NO: 563 - DNA, 20 bp, Glycine max
gattgggccgggaggcatat

SEQ ID NO: 564 - DNA, 20 bp, Glycine max
ttctagcccaatatgcctcc

SEQ ID NO: 565 - DNA, 20 bp, Glycine max
gtaagtttgattgggccggg

SEQ ID NO: 566 - DNA, 20 bp, Glycine max
tgagtaagtttgattgggcc

SEQ ID NO: 567 - DNA, 20 bp, Glycine max
atgagtaagtttgattgggc

SEQ ID NO: 568 - DNA, 20 bp, Glycine max
gatgatgagtaagtttgatt

SEQ ID NO: 569 - DNA, 20 bp, Glycine max
tgatgatgagtaagtttgat

SEQ ID NO: 570 - DNA, 20 bp, Glycine max
atagtaatgattatttttaa

SEQ ID NO: 571 - DNA, 20 bp, Glycine max
aaaaaaaaaaaaggcaagtg

SEQ ID NO: 572 - DNA, 20 bp, Glycine max
aaaaaaaaaaaaaggcaagt

SEQ ID NO: 573 - DNA, 20 bp, Glycine max
aaaaaaaaaaaaaaggcaag

SEQ ID NO: 574 - DNA, 20 bp, Glycine max
ttatcaaaaaaaaaaaaaaa

SEQ ID NO: 575 - DNA, 20 bp, Glycine max
atatttttactattaatact

SEQ ID NO: 576 - DNA, 20 bp, Glycine max
atattgtgttagataatgta

SEQ ID NO: 577 - DNA, 20 bp, Glycine max
tatgaaaatagaagagtaaa

SEQ ID NO: 578 - DNA, 20 bp, Glycine max
atactagcatgaacttttgt

SEQ ID NO: 579 - DNA, 20 bp, Glycine max
ttggttagttaatttaccat

SEQ ID NO: 580 - DNA, 20 bp, Glycine max
ttcaataaaaaacttaccaa

SEQ ID NO: 581 - DNA, 20 bp, Glycine max
tggtaagttttttattgaat

SEQ ID NO: 582 - DNA, 20 bp, Glycine max
gctatctaaattccacaacc

SEQ ID NO: 583 - DNA, 20 bp, Glycine max
ggaagccaccttcctggttg

SEQ ID NO: 584 - DNA, 20 bp, Glycine max
tctaaattccacaaccagga

SEQ ID NO: 585 - DNA, 20 bp, Glycine max
aaattccacaaccaggaagg

SEQ ID NO: 586 - DNA, 20 bp, Glycine max
agtgatggaagccaccttcc

SEQ ID NO: 587 - DNA, 20 bp, Glycine max
ggtacgcttttgagcagtga

SEQ ID NO: 588 - DNA, 20 bp, Glycine max
tccactctccaatgacgaat

SEQ ID NO: 589 - DNA, 20 bp, Glycine max
aaagcgtaccaattcgtcat

SEQ ID NO: 590 - DNA, 20 bp, Glycine max
accaattcgtcattggagag

SEQ ID NO: 591 - DNA, 20 bp, Glycine max
ttcaaaaactgcacagtaat

SEQ ID NO: 592 - DNA, 20 bp, Glycine max
aactgcacagtaataggtag

SEQ ID NO: 593 - DNA, 20 bp, Glycine max
actgcacagtaataggtagt

SEQ ID NO: 594 - DNA, 20 bp, Glycine max
cacagtaataggtagtgggc

SEQ ID NO: 595 - DNA, 20 bp, Glycine max
ggtagtgggcaggtttatct

SEQ ID NO: 596 - DNA, 20 bp, Glycine max
aggtttatctcggaagagca

SEQ ID NO: 597 - DNA, 20 bp, Glycine max
ggtttatctcggaagagcat

SEQ ID NO: 598 - DNA, 20 bp, Glycine max
gtttatctcggaagagcatg

SEQ ID NO: 599 - DNA, 20 bp, Glycine max
ggtgtaagagaaaacaactc

SEQ ID NO: 600 - DNA, 20 bp, Glycine max
tgttttctcttacaccttca

SEQ ID NO: 601 - DNA, 20 bp, Glycine max
gagaactatgttgtccatga

SEQ ID NO: 602 - DNA, 20 bp, Glycine max
gacaacatagttctcgccaa

SEQ ID NO: 603 - DNA, 20 bp, Glycine max
acatagttctcgccaaagga

SEQ ID NO: 604 - DNA, 20 bp, Glycine max
accccaatcactccatcctt

SEQ ID NO: 605 - DNA, 20 bp, Glycine max
tcgccaaaggatggagtgat

SEQ ID NO: 606 - DNA, 20 bp, Glycine max
cgccaaaggatggagtgatt

SEQ ID NO: 607 - DNA, 20 bp, Glycine max
gccaaaggatggagtgattg

SEQ ID NO: 608 - DNA, 20 bp, Glycine max
gaactaacgagtcacgcttt

SEQ ID NO: 609 - DNA, 20 bp, Glycine max
atattacatcgcaccacact

SEQ ID NO: 610 - DNA, 20 bp, Glycine max
aaaacgtaggattccaagtg

SEQ ID NO: 611 - DNA, 20 bp, Glycine max
attttgtattaagaaaacgt

SEQ ID NO: 612 - DNA, 20 bp, Glycine max
aatacaaaattacataatga

SEQ ID NO: 613 - DNA, 20 bp, Glycine max
atacaaaattacataatgaa

SEQ ID NO: 614 - DNA, 20 bp, Glycine max
gggttaattttgtgtttcat

SEQ ID NO: 615 - DNA, 20 bp, Glycine max
ttggtttgtgtattaatttc

SEQ ID NO: 616 - DNA, 20 bp, Glycine max
aatttcaggagagtatatta

SEQ ID NO: 617 - DNA, 20 bp, Glycine max
tatggagaatacaagtgtag

SEQ ID NO: 618 - DNA, 20 bp, Glycine max
gaatacaagtgtagtggacc

SEQ ID NO: 619 - DNA, 20 bp, Glycine max
cttccagccaagttagctcc

SEQ ID NO: 620 - DNA, 20 bp, Glycine max
tagtggaccaggagctaact

SEQ ID NO: 621 - DNA, 20 bp, Glycine max
ggaccaggagctaacttggc

SEQ ID NO: 622 - DNA, 20 bp, Glycine max
acttggctggaagagtgcca

SEQ ID NO: 623 - DNA, 20 bp, Glycine max
ctggaagagtgccatggaca

SEQ ID NO: 624 - DNA, 20 bp, Glycine max
tccgtaagcacccgtgtcca

SEQ ID NO: 625 - DNA, 20 bp, Glycine max
tggaagagtgccatggacac

SEQ ID NO: 626 - DNA, 20 bp, Glycine max
gccatggacacgggtgctta

SEQ ID NO: 627 - DNA, 20 bp, Glycine max
acgggtgcttacggatgaag

SEQ ID NO: 628 - DNA, 20 bp, Glycine max
ttgcatctcaataaaaggct

SEQ ID NO: 629 - DNA, 20 bp, Glycine max
atgaattgcatctcaataaa

SEQ ID NO: 630 - DNA, 20 bp, Glycine max
attgagatgcaattcattga

SEQ ID NO: 631 - DNA, 20 bp, Glycine max
ttgagatgcaattcattgaa

SEQ ID NO: 632 - DNA, 20 bp, Glycine max
tgagatgcaattcattgaag

SEQ ID NO: 633 - DNA, 20 bp, Glycine max
aattcattgaaggggacact

SEQ ID NO: 634 - DNA, 20 bp, Glycine max
aataatttataattgtttag

SEQ ID NO: 635 - DNA, 20 bp, Glycine max
taataatttataattgttta

SEQ ID NO: 636 - DNA, 20 bp, Glycine max
ctaataatttataattgttt

SEQ ID NO: 637 - DNA, 20 bp, Glycine max
atgattattgattgagatta

SEQ ID NO: 638 - DNA, 20 bp, Glycine max
tttatttttatatgttgctt

SEQ ID NO: 639 - DNA, 20 bp, Glycine max
aacatataaaaataaaaaga

SEQ ID NO: 640 - DNA, 20 bp, Glycine max
atagcgaaaattcagaaata

SEQ ID NO: 641 - DNA, 20 bp, Glycine max
aatagcgaaaattcagaaat

SEQ ID NO: 642 - DNA, 20 bp, Glycine max
gtaatgtaagcaacaaggct

SEQ ID NO: 643 - DNA, 20 bp, Glycine max
cacatgtaatgtaagcaaca

SEQ ID NO: 644 - DNA, 20 bp, Glycine max
ataaacagtattaaacatta

SEQ ID NO: 645 - DNA, 20 bp, Glycine max
atgtttaatactgtttatga

SEQ ID NO: 646 - DNA, 20 bp, Glycine max
gtgtttcattgtgctaacat

SEQ ID NO: 647 - DNA, 20 bp, Glycine max
attagcattgcgcacgcgtg

SEQ ID NO: 648 - DNA, 20 bp, Glycine max
tacattgatgggtataaagc

SEQ ID NO: 649 - DNA, 20 bp, Glycine max
tttcttttccgtacattgat

SEQ ID NO: 650 - DNA, 20 bp, Glycine max
ttttcttttccgtacattga

SEQ ID NO: 651 - DNA, 20 bp, Glycine max
gctttatacccatcaatgta

SEQ ID NO: 652 - DNA, 20 bp, Glycine max
tacattatgtttgtgtttct

SEQ ID NO: 653 - DNA, 20 bp, Glycine max
ataatgtagtagaataagac

SEQ ID NO: 654 - DNA, 20 bp, Glycine max
taatgtagtagaataagaca

SEQ ID NO: 655 - DNA, 20 bp, Glycine max
agacagggaagataatttta

SEQ ID NO: 656 - DNA, 20 bp, Glycine max
aattagctgagtgttgcatt

SEQ ID NO: 657 - DNA, 20 bp, Glycine max
ctcagctaatttccagtgtt

SEQ ID NO: 658 - DNA, 20 bp, Glycine max
acatagagtagaccaaacac

SEQ ID NO: 659 - DNA, 20 bp, Glycine max
tggacaaccttgatggcttc

SEQ ID NO: 660 - DNA, 20 bp, Glycine max
agaaactccagaagccatca

SEQ ID NO: 661 - DNA, 20 bp, Glycine max
ataggcatggacaaccttga

SEQ ID NO: 662 - DNA, 20 bp, Glycine max
atcaaggttgtccatgccta

SEQ ID NO: 663 - DNA, 20 bp, Glycine max
tgggaaagcatccataggca

SEQ ID NO: 664 - DNA, 20 bp, Glycine max
ccagctgggaaagcatccat

SEQ ID NO: 665 - DNA, 20 bp, Glycine max
cctatggatgctttcccagc

SEQ ID NO: 666 - DNA, 20 bp, Glycine max
ttgaggtgaagaaaccagct

SEQ ID NO: 667 - DNA, 20 bp, Glycine max
attgaggtgaagaaaccagc

SEQ ID NO: 668 - DNA, 20 bp, Glycine max
agacttgacacacattattg

SEQ ID NO: 669 - DNA, 20 bp, Glycine max
gtctctttttctttccacgt

SEQ ID NO: 670 - DNA, 20 bp, Glycine max
ttgtgccacagagtccaacg

SEQ ID NO: 671 - DNA, 20 bp, Glycine max
tctttccacgttggactctg

SEQ ID NO: 672 - DNA, 20 bp, Glycine max
gactctgtggcacaagttca

SEQ ID NO: 673 - DNA, 20 bp, Glycine max
atggtgacaacatcttatca

SEQ ID NO: 674 - DNA, 5347 bp, Glycine max
  misc_feature (3534)..(3680): n is a, c, g, or t
taaatagaggtcatgtgtgtgtatttttttcaactttgatcatttgaatattaacttcagatttcagagctccttttgagcacaaaatttcgtgctcttctctctctctcccttcattcatctccttcttcctccaagctcttatccatggcctcctatggtggtgagcttcttctagactcatcttctccttgaagtggcgtctcctctctctcttccttctccattccgctgccatttatcttccaagaagcaaaggaatccattgatgaagaagatcctaggcctacaagctccaatggagcttgcatcaaaatttgactaagaataagtttttaccttgaaaatgaattaggtgtagtttgatttatttaataaggatccacaatggcaggctgaagggggtgggtaggtaggtaagtaagaatggctagaagaagaaggcgattcattcattcattccttcccacctaacaccccctcccttatattactttccacacttgccccatttcccattctctcacattaagacaatgacaacggtagctgcttctcttgatgccaaagaggtgtctacctccaaaactgaccaaaaccaagtgtgtgactgtgatccccaaactagccatgtcttcaaatcaaaattaccagatatcccaatctccaaccacctccctctccacgcttactgctttcagaaactatcccaattctccgaccgcccatgcctcatcgtcggacccgccgccaaaacctacacctactccgagacacacctcatttcacgcaagattgccgccggattgtccaacctcggaatccgcaagggcgacgtggtcatgatccttctccagaactccgccgagttcgtcttctccttcctcgctgcctccatgatcggcgccgtcgccaccacagccaatccgttctacaccgccgcggagatcttcaagcagtttaccgtctccaagacgaagctgatcataacgcaggcaatgtacgtggacaagcttcgcaaccacgacgacggcgcgaagctcggcgaggacttcaaggttgtgaccgtcgacgacccgccggaaaattgcctccacttctcggtgctctcggaggcgaacgagagcgacgcgccggaggttgatatccaacccgacgacgcggtggcgatgccgttctcttccggcacgacgggtttacctaaaggagtggttctcacgcacaagagtttaacaaccagtgtggcgcaacaagttgacggagagaaccctaacctctacctcaccaccgaggacgtgctcctatgcgtgcttccgttgtttcacatattctccctcaacagtgtgcttttgtgcgcgcttagggccgggagtgcggttttgttgatgcagaagttcgagattgggacgctgttggagctcatacagcggcaccgcgtgtcggtggcgatggtggtgccgccgctggtgctggcgttggcgaagaatccgatggtggcggattttgacctgagttcaatacggttagtgctgtcgggagctgctcccttggggaaggagctcgtggaagctctccggaacagggtgcctcaagccgttttgggacaggtaacttaacaccacactttacatttaattacacttgccttcaagttattttgataagaaaacacttttattattaataattattgaccgaattttataataaattataaatttacataggtttccttttttatgtaactatatattttaaataagaaaaacttacatatatgttaaagagtgtgttacaaattacaatcaatcttagtttaagataagataagcataatcttcatttaactctcccacctgtattttgtgtggctacttattttcatacaacttttgcatgcggtgcacgtacggttgttggagggcggggaatcaattcgatgatgccattctagtcatctacgttttctttttctattgcctttgctgtgtttgactgtttaattggtgtcttaactctaaacgtggctagctaagtgaggtatacaaaacgtaaattatttttcggcaggaaagttagaaaagatatactggggactatatgaaaatgaaatattaattatgatggcgatggacggaaaaggaaattaaagatgaatttgggtttggagtcatcgcaaactacaatttggttcttccaagttgagttttgctacttgtctatcgtacatcatcaataagaaacagtttcaaaacgtttaccggttcaatctatataacattaaaatcttttgatgctgtttttaattatttattattaagtaaagtataatataagtctcattaaataatgttaactatagaaacataaaaatgtttaaaaaagatattatttatatttttaataccgtgtacatgctaatttttttttattgatactcagtcgtatattttggatcaagtgatccggagcatatgcgtttttttttttcatttttatttcattcccctttgtttgcaacttgaggtggttaaacctttcccagtacgtactacgtagactaattctcgtataaattgtacttcaacatgtcaatcctttttcaaataatttcggtaaggatactatagcgtattattttaactttttttatttatatttttccttaaagttctcttttttatattttaatatactaaaattaaaatagtacctcaccaaacaccaaaatgtaaaaatagtgaataagccgcacaagcacccatataagacttttagtagcgtgtacatggacctaaccaacgtcaaacttggcaccttcatttacgttgtagtttgagttagttaaattgtccaagtgacgtaatgccaaccaacagttaccagtcaaagattcagtggcaaggcgatctgctccagtgcactctatattttaataaatatatatatatatatatatatatatatatatatatatatatatatatatatatatatatatatattttggatacgttagtgtttgaagtatcattaatttttgttagaacgattaccccacgttcaagaaaatgaaacacaatatcactctgatgagtttgttggtacctaaatttaaatttttgaattaaattaaaagaaaatcgaacaaaatatcattaaaataaatattaattattagtttattaatatttattatttttttattctcttctaaccaattttatatgtccttttaaaagaataattaattgtgttggtaagttttacgaaattttataaaaccgagcaattacttttttaaaattaatctgttctaagcatacacttaataacattactgatggttgaattacaaacggaatatttacacaaactggtacattgcgcacgaaaaaagagttggatgggtgccaataatgcgcaaggttgacaaatataaatatgtgctatgcgtttgtgttcctaacattagatgttgttaaggtacatacaaaatccaaattctaaacttgggacatcctcttcttgtgnnnnnnnnnnnnnnnnnnnnnnnnnnnnnnnnnnnnnnnnnnnnnnnnnnnnnnnnnnnnnnnnnnnnnnnnnnnnnnnnnnnnnnnnnnnnnnnnnnnnnnnnnnnnnnnnnnnnnnnnnnnnnnnnnnnnnnnnnnnnnnnnnnntcgttctcttggctacaatcaacccggtgaaatttgcatcagagggcaacagatcatgaaaggtactagtactactataatatagtgttcctctgcactttttctttatacattcttgggaaagaattaatttatatgttaattggctatgcatttactcttaatttcaaatatgtcaggatatctgaacgatgagaaagcgacagcattgaccatagattcagagggttggcttcacaccggtgatgttggctatgtagatgaagatgatgaaattttcattgttgacagggtgaaagaactcatcaaatataaaggcttccaggtatatttacatttaaatttgcctcatcatgtagttttatagagagaaaacaatgtgacagcaagtaattaattaattatatttattcttttgttctgctaggtgccccctgcagaacttgaagggcttcttgtaagccatccctccattgcagacgcagctgtagtcccgtaagcttcttaataatctgaattttaatggtttattgtgcatatatagtggacatgactgactgactaataattttatcaatatgttaacagacaaaaggatgttgctgctggtgaagttcctgttgccttcgttgtgagatcaaacggctttgatctaactgaagaggctgtaaaagagtttatagctaaacaggtatgtaacggtgacaataattatattttagctatttctacacaatttggctcacttcattgatcatatcgatcaaatacataaaacatgaagtgatttacattagtaaatgtaaaagactgcacatataaatttaattgaagcttattgtttaattttttgtcaacaggtagtgttttacaaaagactgcacaaagtttattttgtacatgctattcccaagtctccatcaggaaagatattaaggaaagacctcagagcaaagctagaaaccgccgccactcagacgccttaaaaggctagaacctgcccctttttttttggcaatatctttcttttttatttatttatattattggtttctcacgtgtaatttgcgtatcaatgcttcactgcattaagtcaaagtccgagaagcagttgcacttacacataatcattgtatttttgtgtccattgcccaccaccatgcctgtattgtgattttagatcactaattttcgagaccttgtattattcgtgttatcaaatcctttctattcttcactttttaaattttaacctttagattcattagacaaaaaaatgtcaaggttaattcggagtttgacgaaaagagaagaaaaaattgatcaaaaatctgttaaaaattaaatttgaataatatccaaatgatttaaactttaactaatcatttttgtctaattacttgatttcatcttcatatgatgattggtaaacttggtgtccatcaatttatttttagtttttatttatgttaagatgattgcatatggaatatattatagaaagagaaatgacacctatttaaaaacaaagtgatagaatcgtacttaaaatggtgtagtcaaatggaaaattagttggttaacacgagggggaaagaactcaatcaattcaataatcaaatactgttttatatacaggaagttcgggttattgaagccaacacaga

SEQ ID NO: 675 - DNA, 1575 bp, Glycine max
atgacaacggtagctgcttctcttgatgccaaagaggtgtctacctccaaaactgaccaaaaccaagtgtgtgactgtgatccccaaactagccatgtcttcaaatcaaaattaccagatatcccaatctccaaccacctccctctccacgcttactgctttcagaaactatcccaattctccgaccgcccatgcctcatcgtcggacccgccgccaaaacctacacctactccgagacacacctcatttcacgcaagattgccgccggattgtccaacctcggaatccgcaagggcgacgtggtcatgatccttctccagaactccgccgagttcgtcttctccttcctcgctgcctccatgatcggcgccgtcgccaccacagccaatccgttctacaccgccgcggagatcttcaagcagtttaccgtctccaagacgaagctgatcataacgcaggcaatgtacgtggacaagcttcgcaaccacgacgacggcgcgaagctcggcgaggacttcaaggttgtgaccgtcgacgacccgccggaaaattgcctccacttctcggtgctctcggaggcgaacgagagcgacgcgccggaggttgatatccaacccgacgacgcggtggcgatgccgttctcttccggcacgacgggtttacctaaaggagtggttctcacgcacaagagtttaacaaccagtgtggcgcaacaagttgacggagagaaccctaacctctacctcaccaccgaggacgtgctcctatgcgtgcttccgttgtttcacatattctccctcaacagtgtgcttttgtgcgcgcttagggccgggagtgcggttttgttgatgcagaagttcgagattgggacgctgttggagctcatacagcggcaccgcgtgtcggtggcgatggtggtgccgccgctggtgctggcgttggcgaagaatccgatggtggcggattttgacctgagttcaatacggttagtgctgtcgggagctgctcccttggggaaggagctcgtggaagctctccggaacagggtgcctcaagccgttttgggacagcgttctcttggctacaatcaacccggtgaaatttgcatcagagggcaacagatcatgaaaggatatctgaacgatgagaaagcgacagcattgaccatagattcagagggttggcttcacaccggtgatgttggctatgtagatgaagatgatgaaattttcattgttgacagggtgaaagaactcatcaaatataaaggcttccaggtgccccctgcagaacttgaagggcttcttgtaagccatccctccattgcagacgcagctgtagtcccacaaaaggatgttgctgctggtgaagttcctgttgccttcgttgtgagatcaaacggctttgatctaactgaagaggctgtaaaagagtttatagctaaacaggtagtgttttacaaaagactgcacaaagtttattttgtacatgctattcccaagtctccatcaggaaagatattaaggaaagacctcagagcaaagctagaaaccgccgccactcagacgccttaa

SEQ ID NO: 676 - protein, 524 aa, Glycine max
MTTVAASLDAKEVSTSKTDQNQVCDCDPQTSHVFKSKLPDIPISNHLPLHAYCFQKLSQFSDRPCLIVGPAAKTYTYSETHLISRKIAAGLSNLGIRKGDVVMILLQNSAEFVFSFLAASMIGAVATTANPFYTAAEIFKQFTVSKTKLIITQAMYVDKLRNHDDGAKLGEDFKVVTVDDPPENCLHFSVLSEANESDAPEVDIQPDDAVAMPFSSGTTGLPKGVVLTHKSLTTSVAQQVDGENPNLYLTTEDVLLCVLPLFHIFSLNSVLLCALRAGSAVLLMQKFEIGTLLELIQRHRVSVAMVVPPLVLALAKNPMVADFDLSSIRLVLSGAAPLGKELVEALRNRVPQAVLGQRSLGYNQPGEICIRGQQIMKGYLNDEKATALTIDSEGWLHTGDVGYVDEDDEIFIVDRVKELIKYKGFQVPPAELEGLLVSHPSIADAAVVPQKDVAAGEVPVAFVVRSNGFDLTEEAVKEFIAKQVVFYKRLHKVYFVHAIPKSPSGKILRKDLRAKLETAATQTP

SEQ ID NO: 677 - DNA, 20 bp, Glycine max
ttgtcttaatgtgagagaat

SEQ ID NO: 678 - DNA, 20 bp, Glycine max
attgtcttaatgtgagagaa

SEQ ID NO: 679 - DNA, 20 bp, Glycine max
tcacattaagacaatgacaa

SEQ ID NO: 680 - DNA, 20 bp, Glycine max
tgcttctcttgatgccaaag

SEQ ID NO: 681 - DNA, 20 bp, Glycine max
tttggaggtagacacctctt

SEQ ID NO: 682 - DNA, 20 bp, Glycine max
ttggttttggtcagttttgg

SEQ ID NO: 683 - DNA, 20 bp, Glycine max
cacttggttttggtcagttt

SEQ ID NO: 684 - DNA, 20 bp, Glycine max
cacagtcacacacttggttt

SEQ ID NO: 685 - DNA, 20 bp, Glycine max
ggggatcacagtcacacact

SEQ ID NO: 686 - DNA, 20 bp, Glycine max
ttgaagacatggctagtttg

SEQ ID NO: 687 - DNA, 20 bp, Glycine max
tttgaagacatggctagttt

SEQ ID NO: 688 - DNA, 20 bp, Glycine max
atttgaagacatggctagtt

SEQ ID NO: 689 - DNA, 20 bp, Glycine max
gtaattttgatttgaagaca

SEQ ID NO: 690 - DNA, 20 bp, Glycine max
tggttggagattgggatatc

SEQ ID NO: 691 - DNA, 20 bp, Glycine max
gagggaggtggttggagatt

SEQ ID NO: 692 - DNA, 20 bp, Glycine max
agagggaggtggttggagat

SEQ ID NO: 693 - DNA, 20 bp, Glycine max
agcgtggagagggaggtggt

SEQ ID NO: 694 - DNA, 20 bp, Glycine max
agtaagcgtggagagggagg

SEQ ID NO: 695 - DNA, 20 bp, Glycine max
agcagtaagcgtggagaggg

SEQ ID NO: 696 - DNA, 20 bp, Glycine max
gaaagcagtaagcgtggaga

SEQ ID NO: 697 - DNA, 20 bp, Glycine max
tgaaagcagtaagcgtggag

SEQ ID NO: 698 - DNA, 20 bp, Glycine max
gtttctgaaagcagtaagcg

SEQ ID NO: 699 - DNA, 20 bp, Glycine max
gcatgggcggtcggagaatt

SEQ ID NO: 700 - DNA, 20 bp, Glycine max
ggcatgggcggtcggagaat

SEQ ID NO: 701 - DNA, 20 bp, Glycine max
gacgatgaggcatgggcggt

SEQ ID NO: 702 - DNA, 20 bp, Glycine max
gtccgacgatgaggcatggg

SEQ ID NO: 703 - DNA, 20 bp, Glycine max
cgggtccgacgatgaggcat

SEQ ID NO: 704 - DNA, 20 bp, Glycine max
gcgggtccgacgatgaggca

SEQ ID NO: 705 - DNA, 20 bp, Glycine max
gaccgcccatgcctcatcgt

SEQ ID NO: 706 - DNA, 20 bp, Glycine max
tggcggcgggtccgacgatg

SEQ ID NO: 707 - DNA, 20 bp, Glycine max
taggtgtaggttttggcggc

SEQ ID NO: 708 - DNA, 20 bp, Glycine max
gtaggtgtaggttttggcgg

SEQ ID NO: 709 - DNA, 20 bp, Glycine max
ggagtaggtgtaggttttgg

SEQ ID NO: 710 - DNA, 20 bp, Glycine max
ctcggagtaggtgtaggttt

SEQ ID NO: 711 - DNA, 20 bp, Glycine max
gtgtgtctcggagtaggtgt

SEQ ID NO: 712 - DNA, 20 bp, Glycine max
aatgaggtgtgtctcggagt

SEQ ID NO: 713 - DNA, 20 bp, Glycine max
gcgtgaaatgaggtgtgtct

SEQ ID NO: 714 - DNA, 20 bp, Glycine max
cggcaatcttgcgtgaaatg

SEQ ID NO: 715 - DNA, 20 bp, Glycine max
atttcacgcaagattgccgc

SEQ ID NO: 716 - DNA, 20 bp, Glycine max
tccgaggttggacaatccgg

SEQ ID NO: 717 - DNA, 20 bp, Glycine max
gattccgaggttggacaatc

SEQ ID NO: 718 - DNA, 20 bp, Glycine max
gccgccggattgtccaacct

SEQ ID NO: 719 - DNA, 20 bp, Glycine max
gcccttgcggattccgaggt

SEQ ID NO: 720 - DNA, 20 bp, Glycine max
cgtcgcccttgcggattccg

SEQ ID NO: 721 - DNA, 20 bp, Glycine max
gtccaacctcggaatccgca

SEQ ID NO: 722 - DNA, 20 bp, Glycine max
tccaacctcggaatccgcaa

SEQ ID NO: 723 - DNA, 20 bp, Glycine max
tcatgaccacgtcgcccttg

SEQ ID NO: 724 - DNA, 20 bp, Glycine max
cggaatccgcaagggcgacg

SEQ ID NO: 725 - DNA, 20 bp, Glycine max
actcggcggagttctggaga

SEQ ID NO: 726 - DNA, 20 bp, Glycine max
agacgaactcggcggagttc

SEQ ID NO: 727 - DNA, 20 bp, Glycine max
gaaggagaagacgaactcgg

SEQ ID NO: 728 - DNA, 20 bp, Glycine max
gaggaaggagaagacgaact

SEQ ID NO: 729 - DNA, 20 bp, Glycine max
gatcatggaggcagcgagga

SEQ ID NO: 730 - DNA, 20 bp, Glycine max
cgccgatcatggaggcagcg

SEQ ID NO: 731 - DNA, 20 bp, Glycine max
ggcgacggcgccgatcatgg

SEQ ID NO: 732 - DNA, 20 bp, Glycine max
ttcctcgctgcctccatgat

SEQ ID NO: 733 - DNA, 20 bp, Glycine max
ggtggcgacggcgccgatca

SEQ ID NO: 734 - DNA, 20 bp, Glycine max
cggattggctgtggtggcga

SEQ ID NO: 735 - DNA, 20 bp, Glycine max
gtagaacggattggctgtgg

SEQ ID NO: 736 - DNA, 20 bp, Glycine max
ggtgtagaacggattggctg

SEQ ID NO: 737 - DNA, 20 bp, Glycine max
cgcggcggtgtagaacggat

SEQ ID NO: 738 - DNA, 20 bp, Glycine max
atctccgcggcggtgtagaa

SEQ ID NO: 739 - DNA, 20 bp, Glycine max
caatccgttctacaccgccg

SEQ ID NO: 740 - DNA, 20 bp, Glycine max
ctgcttgaagatctccgcgg

SEQ ID NO: 741 - DNA, 20 bp, Glycine max
aaactgcttgaagatctccg

SEQ ID NO: 742 - DNA, 20 bp, Glycine max
gatcagcttcgtcttggaga

SEQ ID NO: 743 - DNA, 20 bp, Glycine max
cgttatgatcagcttcgtct

SEQ ID NO: 744 - DNA, 20 bp, Glycine max
gacgaagctgatcataacgc

SEQ ID NO: 745 - DNA, 20 bp, Glycine max
cataacgcaggcaatgtacg

SEQ ID NO: 746 - DNA, 20 bp, Glycine max
aagcttcgcaaccacgacga

SEQ ID NO: 747 - DNA, 20 bp, Glycine max
cgagcttcgcgccgtcgtcg

SEQ ID NO: 748 - DNA, 20 bp, Glycine max
cacgacgacggcgcgaagct

SEQ ID NO: 749 - DNA, 20 bp, Glycine max
cgacggcgcgaagctcggcg

SEQ ID NO: 750 - DNA, 20 bp, Glycine max
gaagctcggcgaggacttca

SEQ ID NO: 751 - DNA, 20 bp, Glycine max
attttccggcgggtcgtcga

SEQ ID NO: 752 - DNA, 20 bp, Glycine max
tgtgaccgtcgacgacccgc

SEQ ID NO: 753 - DNA, 20 bp, Glycine max
agtggaggcaattttccggc

SEQ ID NO: 754 - DNA, 20 bp, Glycine max
aagtggaggcaattttccgg

SEQ ID NO: 755 - DNA, 20 bp, Glycine max
gagaagtggaggcaattttc

SEQ ID NO: 756 - DNA, 20 bp, Glycine max
ccgagagcaccgagaagtgg

SEQ ID NO: 757 - DNA, 20 bp, Glycine max
ggaaaattgcctccacttct

SEQ ID NO: 758 - DNA, 20 bp, Glycine max
cctccgagagcaccgagaag

SEQ ID NO: 759 - DNA, 20 bp, Glycine max
cctccacttctcggtgctct

SEQ ID NO: 760 - DNA, 20 bp, Glycine max
ccacttctcggtgctctcgg

SEQ ID NO: 761 - DNA, 20 bp, Glycine max
ggcgaacgagagcgacgcgc

SEQ ID NO: 762 - DNA, 20 bp, Glycine max
gaacgagagcgacgcgccgg

SEQ ID NO: 763 - DNA, 20 bp, Glycine max
tcgggttggatatcaacctc

SEQ ID NO: 764 - DNA, 20 bp, Glycine max
tcgccaccgcgtcgtcgggt

SEQ ID NO: 765 - DNA, 20 bp, Glycine max
ggcatcgccaccgcgtcgtc

SEQ ID NO: 766 - DNA, 20 bp, Glycine max
tgatatccaacccgacgacg

SEQ ID NO: 767 - DNA, 20 bp, Glycine max
cggcatcgccaccgcgtcgt

SEQ ID NO: 768 - DNA, 20 bp, Glycine max
tatccaacccgacgacgcgg

SEQ ID NO: 769 - DNA, 20 bp, Glycine max
cccgtcgtgccggaagagaa

SEQ ID NO: 770 - DNA, 20 bp, Glycine max
gtggcgatgccgttctcttc

SEQ ID NO: 771 - DNA, 20 bp, Glycine max
gccgttctcttccggcacga

SEQ ID NO: 772 - DNA, 20 bp, Glycine max
tttaggtaaacccgtcgtgc

SEQ ID NO: 773 - DNA, 20 bp, Glycine max
ccgttctcttccggcacgac

SEQ ID NO: 774 - DNA, 20 bp, Glycine max
ggcacgacgggtttacctaa

SEQ ID NO: 775 - DNA, 20 bp, Glycine max
tgcgtgagaaccactccttt

SEQ ID NO: 776 - DNA, 20 bp, Glycine max
gacgggtttacctaaaggag

SEQ ID NO: 777 - DNA, 20 bp, Glycine max
caagagtttaacaaccagtg

SEQ ID NO: 778 - DNA, 20 bp, Glycine max
gtcaacttgttgcgccacac

SEQ ID NO: 779 - DNA, 20 bp, Glycine max
agtgtggcgcaacaagttga

SEQ ID NO: 780 - DNA, 20 bp, Glycine max
cggtggtgaggtagaggtta

SEQ ID NO: 781 - DNA, 20 bp, Glycine max
tcggtggtgaggtagaggtt

SEQ ID NO: 782 - DNA, 20 bp, Glycine max
cgtcctcggtggtgaggtag

SEQ ID NO: 783 - DNA, 20 bp, Glycine max
ggagcacgtcctcggtggtg

SEQ ID NO: 784 - DNA, 20 bp, Glycine max
taacctctacctcaccaccg

SEQ ID NO: 785 - DNA, 20 bp, Glycine max
gcataggagcacgtcctcgg

SEQ ID NO: 786 - DNA, 20 bp, Glycine max
cacgcataggagcacgtcct

SEQ ID NO: 787 - DNA, 20 bp, Glycine max
gaaacaacggaagcacgcat

SEQ ID NO: 788 - DNA, 20 bp, Glycine max
agggagaatatgtgaaacaa

SEQ ID NO: 789 - DNA, 20 bp, Glycine max
gcacaaaagcacactgttga

SEQ ID NO: 790 - DNA, 20 bp, Glycine max
cgcacaaaagcacactgttg

SEQ ID NO: 791 - DNA, 20 bp, Glycine max
gtgtgcttttgtgcgcgctt

SEQ ID NO: 792 - DNA, 20 bp, Glycine max
tgtgcttttgtgcgcgctta

SEQ ID NO: 793 - DNA, 20 bp, Glycine max
cttttgtgcgcgcttagggc

SEQ ID NO: 794 - DNA, 20 bp, Glycine max
ttttgtgcgcgcttagggcc

SEQ ID NO: 795 - DNA, 20 bp, Glycine max
cgcgcttagggccgggagtg

SEQ ID NO: 796 - DNA, 20 bp, Glycine max
catcaacaaaaccgcactcc

SEQ ID NO: 797 - DNA, 20 bp, Glycine max
ttgatgcagaagttcgagat

SEQ ID NO: 798 - DNA, 20 bp, Glycine max
tgatgcagaagttcgagatt

SEQ ID NO: 799 - DNA, 20 bp, Glycine max
gttcgagattgggacgctgt

SEQ ID NO: 800 - DNA, 20 bp, Glycine max
cgctgttggagctcatacag

SEQ ID NO: 801 - DNA, 20 bp, Glycine max
catacagcggcaccgcgtgt

SEQ ID NO: 802 - DNA, 20 bp, Glycine max
ccaccatcgccaccgacacg

SEQ ID NO: 803 - DNA, 20 bp, Glycine max
acagcggcaccgcgtgtcgg

SEQ ID NO: 804 - DNA, 20 bp, Glycine max
gcaccgcgtgtcggtggcga

SEQ ID NO: 805 - DNA, 20 bp, Glycine max
ccgcgtgtcggtggcgatgg

SEQ ID NO: 806 - DNA, 20 bp, Glycine max
ggcgatggtggtgccgccgc

SEQ ID NO: 807 - DNA, 20 bp, Glycine max
gccaacgccagcaccagcgg

SEQ ID NO: 808 - DNA, 20 bp, Glycine max
ttcgccaacgccagcaccag

SEQ ID NO: 809 - DNA, 20 bp, Glycine max
ggtggtgccgccgctggtgc

SEQ ID NO: 810 - DNA, 20 bp, Glycine max
gccgccgctggtgctggcgt

SEQ ID NO: 811 - DNA, 20 bp, Glycine max
ggcgttggcgaagaatccga

SEQ ID NO: 812 - DNA, 20 bp, Glycine max
gttggcgaagaatccgatgg

SEQ ID NO: 813 - DNA, 20 bp, Glycine max
aggtcaaaatccgccaccat

SEQ ID NO: 814 - DNA, 20 bp, Glycine max
ggcgaagaatccgatggtgg

SEQ ID NO: 815 - DNA, 20 bp, Glycine max
gcactaaccgtattgaactc

SEQ ID NO: 816 - DNA, 20 bp, Glycine max
attttgacctgagttcaata

SEQ ID NO: 817 - DNA, 20 bp, Glycine max
ttcaatacggttagtgctgt

SEQ ID NO: 818 - DNA, 20 bp, Glycine max
tcaatacggttagtgctgtc

SEQ ID NO: 819 - DNA, 20 bp, Glycine max
gctgtcgggagctgctccct

SEQ ID NO: 820 - DNA, 20 bp, Glycine max
ctgtcgggagctgctccctt

SEQ ID NO: 821 - DNA, 20 bp, Glycine max
tgtcgggagctgctcccttg

SEQ ID NO: 822 - DNA, 20 bp, Glycine max
tccacgagctccttccccaa

SEQ ID NO: 823 - DNA, 20 bp, Glycine max
gggagctgctcccttgggga

SEQ ID NO: 824 - DNA, 20 bp, Glycine max
ttccacgagctccttcccca

SEQ ID NO: 825 - DNA, 20 bp, Glycine max
tcccttggggaaggagctcg

SEQ ID NO: 826 - DNA, 20 bp, Glycine max
aggagctcgtggaagctctc

SEQ ID NO: 827 - DNA, 20 bp, Glycine max
tcgtggaagctctccggaac

SEQ ID NO: 828 - DNA, 20 bp, Glycine max
cgtggaagctctccggaaca

SEQ ID NO: 829 - DNA, 20 bp, Glycine max
cggcttgaggcaccctgttc

SEQ ID NO: 830 - DNA, 20 bp, Glycine max
acctgtcccaaaacggcttg

SEQ ID NO: 831 - DNA, 20 bp, Glycine max
cagggtgcctcaagccgttt

SEQ ID NO: 832 - DNA, 20 bp, Glycine max
agggtgcctcaagccgtttt

SEQ ID NO: 833 - DNA, 20 bp, Glycine max
ttaagttacctgtcccaaaa

SEQ ID NO: 834 - DNA, 20 bp, Glycine max
gcctcaagccgttttgggac

SEQ ID NO: 835 - DNA, 20 bp, Glycine max
gtgtaattaaatgtaaagtg

SEQ ID NO: 836 - DNA, 20 bp, Glycine max
ttcttatcaaaataacttga

SEQ ID NO: 837 - DNA, 20 bp, Glycine max
ttataatttattataaaatt

SEQ ID NO: 838 - DNA, 20 bp, Glycine max
aataaattataaatttacat

SEQ ID NO: 839 - DNA, 20 bp, Glycine max
aatatatagttacataaaaa

SEQ ID NO: 840 - DNA, 20 bp, Glycine max
tagccacacaaaatacaggt

SEQ ID NO: 841 - DNA, 20 bp, Glycine max
gtagccacacaaaatacagg

SEQ ID NO: 842 - DNA, 20 bp, Glycine max
taagtagccacacaaaatac

SEQ ID NO: 843 - DNA, 20 bp, Glycine max
tctcccacctgtattttgtg

SEQ ID NO: 844 - DNA, 20 bp, Glycine max
tttcatacaacttttgcatg

SEQ ID NO: 845 - DNA, 20 bp, Glycine max
ttttgcatgcggtgcacgta

SEQ ID NO: 846 - DNA, 20 bp, Glycine max
tgcggtgcacgtacggttgt

SEQ ID NO: 847 - DNA, 20 bp, Glycine max
ggtgcacgtacggttgttgg

SEQ ID NO: 848 - DNA, 20 bp, Glycine max
gtgcacgtacggttgttgga

SEQ ID NO: 849 - DNA, 20 bp, Glycine max
cacgtacggttgttggaggg

SEQ ID NO: 850 - DNA, 20 bp, Glycine max
acgtacggttgttggagggc

SEQ ID NO: 851 - DNA, 20 bp, Glycine max
cgtacggttgttggagggcg

SEQ ID NO: 852 - DNA, 20 bp, Glycine max
gaaaacgtagatgactagaa

SEQ ID NO: 853 - DNA, 20 bp, Glycine max
taaacagtcaaacacagcaa

SEQ ID NO: 854 - DNA, 20 bp, Glycine max
gctgtgtttgactgtttaat

SEQ ID NO: 855 - DNA, 20 bp, Glycine max
tggtgtcttaactctaaacg

SEQ ID NO: 856 - DNA, 20 bp, Glycine max
taaacgtggctagctaagtg

SEQ ID NO: 857 - DNA, 20 bp, Glycine max
acaaaacgtaaattattttt

SEQ ID NO: 858 - DNA, 20 bp, Glycine max
aacgtaaattatttttcggc

SEQ ID NO: 859 - DNA, 20 bp, Glycine max
gaaagttagaaaagatatac

SEQ ID NO: 860 - DNA, 20 bp, Glycine max
aaagttagaaaagatatact

SEQ ID NO: 861 - DNA, 20 bp, Glycine max
aagttagaaaagatatactg

SEQ ID NO: 862 - DNA, 20 bp, Glycine max
aaatgaaatattaattatga

SEQ ID NO: 863 - DNA, 20 bp, Glycine max
aatattaattatgatggcga

SEQ ID NO: 864 - DNA, 20 bp, Glycine max
ttaattatgatggcgatgga

SEQ ID NO: 865 - DNA, 20 bp, Glycine max
atgatggcgatggacggaaa

SEQ ID NO: 866 - DNA, 20 bp, Glycine max
aaggaaattaaagatgaatt

SEQ ID NO: 867 - DNA, 20 bp, Glycine max
aggaaattaaagatgaattt

SEQ ID NO: 868 - DNA, 20 bp, Glycine max
attaaagatgaatttgggtt

SEQ ID NO: 869 - DNA, 20 bp, Glycine max
agtcatcgcaaactacaatt

SEQ ID NO: 870 - DNA, 20 bp, Glycine max
acaagtagcaaaactcaact

SEQ ID NO: 871 - DNA, 20 bp, Glycine max
aacagtttcaaaacgtttac

SEQ ID NO: 872 - DNA, 20 bp, Glycine max
taatgttatatagattgaac

SEQ ID NO: 873 - DNA, 20 bp, Glycine max
aaaaaaaattagcatgtaca

SEQ ID NO: 874 - DNA, 20 bp, Glycine max
tgatactcagtcgtatattt

SEQ ID NO: 875 - DNA, 20 bp, Glycine max
atattttggatcaagtgatc

SEQ ID NO: 876 - DNA, 20 bp, Glycine max
aaaaaaaaacgcatatgctc

SEQ ID NO: 877 - DNA, 20 bp, Glycine max
acctcaagttgcaaacaaag

SEQ ID NO: 878 - DNA, 20 bp, Glycine max
cacctcaagttgcaaacaaa

SEQ ID NO: 879 - DNA, 20 bp, Glycine max
ccacctcaagttgcaaacaa

SEQ ID NO: 880 - DNA, 20 bp, Glycine max
tcccctttgtttgcaacttg

SEQ ID NO: 881 - DNA, 20 bp, Glycine max
cctttgtttgcaacttgagg

SEQ ID NO: 882 - DNA, 20 bp, Glycine max
tacgtagtacgtactgggaa

SEQ ID NO: 883 - DNA, 20 bp, Glycine max
tagtctacgtagtacgtact

SEQ ID NO: 884 - DNA, 20 bp, Glycine max
ttagtctacgtagtacgtac

SEQ ID NO: 885 - DNA, 20 bp, Glycine max
ttaccgaaattatttgaaaa

SEQ ID NO: 886 - DNA, 20 bp, Glycine max
aatcctttttcaaataattt

SEQ ID NO: 887 - DNA, 20 bp, Glycine max
tttttcaaataatttcggta

SEQ ID NO: 888 - DNA, 20 bp, Glycine max
atataaaaaagagaacttta

SEQ ID NO: 889 - DNA, 20 bp, Glycine max
ttacattttggtgtttggtg

SEQ ID NO: 890 - DNA, 20 bp, Glycine max
tatttttacattttggtgtt

SEQ ID NO: 891 - DNA, 20 bp, Glycine max
tattcactatttttacattt

SEQ ID NO: 892 - DNA, 20 bp, Glycine max
gtcttatatgggtgcttgtg

SEQ ID NO: 893 - DNA, 20 bp, Glycine max
cgctactaaaagtcttatat

SEQ ID NO: 894 - DNA, 20 bp, Glycine max
acgctactaaaagtcttata

SEQ ID NO: 895 - DNA, 20 bp, Glycine max
gacttttagtagcgtgtaca

SEQ ID NO: 896 - DNA, 20 bp, Glycine max
tgccaagtttgacgttggtt

SEQ ID NO: 897 - DNA, 20 bp, Glycine max
gaaggtgccaagtttgacgt

SEQ ID NO: 898 - DNA, 20 bp, Glycine max
gacctaaccaacgtcaaact

SEQ ID NO: 899 - DNA, 20 bp, Glycine max
tcaaactacaacgtaaatga

SEQ ID NO: 900 - DNA, 20 bp, Glycine max
ttggttggcattacgtcact

SEQ ID NO: 901 - DNA, 20 bp, Glycine max
tttgactggtaactgttggt

SEQ ID NO: 902 - DNA, 20 bp, Glycine max
aatctttgactggtaactgt

SEQ ID NO: 903 - DNA, 20 bp, Glycine max
cttgccactgaatctttgac

SEQ ID NO: 904 - DNA, 20 bp, Glycine max
gttaccagtcaaagattcag

SEQ ID NO: 905 - DNA, 20 bp, Glycine max
cagtcaaagattcagtggca

SEQ ID NO: 906 - DNA, 20 bp, Glycine max
tattaaaatatagagtgcac

SEQ ID NO: 907 - DNA, 20 bp, Glycine max
atatatatatatatatattt

SEQ ID NO: 908 - DNA, 20 bp, Glycine max
gtttcattttcttgaacgtg

SEQ ID NO: 909 - DNA, 20 bp, Glycine max
tgtttcattttcttgaacgt

SEQ ID NO: 910 - DNA, 20 bp, Glycine max
gtgtttcattttcttgaacg

SEQ ID NO: 911 - DNA, 20 bp, Glycine max
tatcactctgatgagtttgt

SEQ ID NO: 912 - DNA, 20 bp, Glycine max
taattcaaaaatttaaattt

SEQ ID NO: 913 - DNA, 20 bp, Glycine max
tttaaaaggacatataaaat

SEQ ID NO: 914 - DNA, 20 bp, Glycine max
caattaattattcttttaaa

SEQ ID NO: 915 - DNA, 20 bp, Glycine max
aaaagaataattaattgtgt

SEQ ID NO: 916 - DNA, 20 bp, Glycine max
attttaaaaaagtaattgct

SEQ ID NO: 917 - DNA, 20 bp, Glycine max
acacttaataacattactga

SEQ ID NO: 918 - DNA, 20 bp, Glycine max
actgatggttgaattacaaa

SEQ ID NO: 919 - DNA, 20 bp, Glycine max
aacggaatatttacacaaac

SEQ ID NO: 920 - DNA, 20 bp, Glycine max
attgcgcacgaaaaaagagt

SEQ ID NO: 921 - DNA, 20 bp, Glycine max
cgcacgaaaaaagagttgga

SEQ ID NO: 922 - DNA, 20 bp, Glycine max
gcacgaaaaaagagttggat

SEQ ID NO: 923 - DNA, 20 bp, Glycine max
ttgtcaaccttgcgcattat

SEQ ID NO: 924 - DNA, 20 bp, Glycine max
atgggtgccaataatgcgca

SEQ ID NO: 925 - DNA, 20 bp, Glycine max
ccttaacaacatctaatgtt

SEQ ID NO: 926 - DNA, 20 bp, Glycine max
cctaacattagatgttgtta

SEQ ID NO: 927 - DNA, 20 bp, Glycine max
gatgtcccaagtttagaatt

SEQ ID NO: 928 - DNA, 20 bp, Glycine max
caaaatccaaattctaaact

SEQ ID NO: 929 - DNA, 20 bp, Glycine max
aaaatccaaattctaaactt

SEQ ID NO: 930 - DNA, 20 bp, Glycine max
caagagaacgacacaagaag

SEQ ID NO: 931 - DNA, 20 bp, Glycine max
ctcttcttgtgtcgttctct

SEQ ID NO: 932 - DNA, 20 bp, Glycine max
tctcttggctacaatcaacc

SEQ ID NO: 933 - DNA, 20 bp, Glycine max
cctctgatgcaaatttcacc

SEQ ID NO: 934 - DNA, 20 bp, Glycine max
ccctctgatgcaaatttcac

SEQ ID NO: 935 - DNA, 20 bp, Glycine max
cccggtgaaatttgcatcag

SEQ ID NO: 936 - DNA, 20 bp, Glycine max
ccggtgaaatttgcatcaga

SEQ ID NO: 937 - DNA, 20 bp, Glycine max
agagggcaacagatcatgaa

SEQ ID NO: 938 - DNA, 20 bp, Glycine max
tgtataaagaaaaagtgcag

SEQ ID NO: 939 - DNA, 20 bp, Glycine max
actttttctttatacattct

SEQ ID NO: 940 - DNA, 20 bp, Glycine max
ctttttctttatacattctt

SEQ ID NO: 941 - DNA, 20 bp, Glycine max
gaattaatttatatgttaat

SEQ ID NO: 942 - DNA, 20 bp, Glycine max
ctcttaatttcaaatatgtc

SEQ ID NO: 943 - DNA, 20 bp, Glycine max
aagccaaccctctgaatcta

SEQ ID NO: 944 - DNA, 20 bp, Glycine max
agcattgaccatagattcag

SEQ ID NO: 945 - DNA, 20 bp, Glycine max
gcattgaccatagattcaga

SEQ ID NO: 946 - DNA, 20 bp, Glycine max
tgaccatagattcagagggt

SEQ ID NO: 947 - DNA, 20 bp, Glycine max
tcagagggttggcttcacac

SEQ ID NO: 948 - DNA, 20 bp, Glycine max
atctacatagccaacatcac

SEQ ID NO: 949 - DNA, 20 bp, Glycine max
tggcttcacaccggtgatgt

SEQ ID NO: 950 - DNA, 20 bp, Glycine max
atgaaattttcattgttgac

SEQ ID NO: 951 - DNA, 20 bp, Glycine max
tgaaattttcattgttgaca

SEQ ID NO: 952 - DNA, 20 bp, Glycine max
aaagaactcatcaaatataa

SEQ ID NO: 953 - DNA, 20 bp, Glycine max
catcaaatataaaggcttcc

SEQ ID NO: 954 - DNA, 20 bp, Glycine max
aatttaaatgtaaatatacc

SEQ ID NO: 955 - DNA, 20 bp, Glycine max
ctctataaaactacatgatg

SEQ ID NO: 956 - DNA, 20 bp, Glycine max
atttattcttttgttctgct

SEQ ID NO: 957 - DNA, 20 bp, Glycine max
agcccttcaagttctgcagg

SEQ ID NO: 958 - DNA, 20 bp, Glycine max
aagcccttcaagttctgcag

SEQ ID NO: 959 - DNA, 20 bp, Glycine max
gaagcccttcaagttctgca

SEQ ID NO: 960 - DNA, 20 bp, Glycine max
agaagcccttcaagttctgc

SEQ ID NO: 961 - DNA, 20 bp, Glycine max
gtgccccctgcagaacttga

SEQ ID NO: 962 - DNA, 20 bp, Glycine max
tgccccctgcagaacttgaa

SEQ ID NO: 963 - DNA, 20 bp, Glycine max
ctgcgtctgcaatggaggga

SEQ ID NO: 964 - DNA, 20 bp, Glycine max
acagctgcgtctgcaatgga

SEQ ID NO: 965 - DNA, 20 bp, Glycine max
tacagctgcgtctgcaatgg

SEQ ID NO: 966 - DNA, 20 bp, Glycine max
gactacagctgcgtctgcaa

SEQ ID NO: 967 - DNA, 20 bp, Glycine max
cagattattaagaagcttac

SEQ ID NO: 968 - DNA, 20 bp, Glycine max
tcagattattaagaagctta

SEQ ID NO: 969 - DNA, 20 bp, Glycine max
cttaataatctgaattttaa

SEQ ID NO: 970 - DNA, 20 bp, Glycine max
ggtttattgtgcatatatag

SEQ ID NO: 971 - DNA, 20 bp, Glycine max
tcaatatgttaacagacaaa

SEQ ID NO: 972 - DNA, 20 bp, Glycine max
agacaaaaggatgttgctgc

SEQ ID NO: 973 - DNA, 20 bp, Glycine max
gatctcacaacgaaggcaac

SEQ ID NO: 974 - DNA, 20 bp, Glycine max
gccgtttgatctcacaacga

SEQ ID NO: 975 - DNA, 20 bp, Glycine max
gccttcgttgtgagatcaaa

SEQ ID NO: 976 - DNA, 20 bp, Glycine max
cggctttgatctaactgaag

SEQ ID NO: 977 - DNA, 20 bp, Glycine max
aaaagagtttatagctaaac

SEQ ID NO: 978 - DNA, 20 bp, Glycine max
atagctaaacaggtatgtaa

SEQ ID NO: 979 - DNA, 20 bp, Glycine max
ttagctatttctacacaatt

SEQ ID NO: 980 - DNA, 20 bp, Glycine max
ttgtttaattttttgtcaac

SEQ ID NO: 981 - DNA, 20 bp, Glycine max
atctttcctgatggagactt

SEQ ID NO: 982 - DNA, 20 bp, Glycine max
tatctttcctgatggagact

SEQ ID NO: 983 - DNA, 20 bp, Glycine max
gctattcccaagtctccatc

SEQ ID NO: 984 - DNA, 20 bp, Glycine max
ttccttaatatctttcctga

SEQ ID NO: 985 - DNA, 20 bp, Glycine max
ctccatcaggaaagatatta

SEQ ID NO: 986 - DNA, 20 bp, Glycine max
cggtttctagctttgctctg

SEQ ID NO: 987 - DNA, 20 bp, Glycine max
ttaaggcgtctgagtggcgg

SEQ ID NO: 988 - DNA, 20 bp, Glycine max
cttttaaggcgtctgagtgg

SEQ ID NO: 989 - DNA, 20 bp, Glycine max
agccttttaaggcgtctgag

SEQ ID NO: 990 - DNA, 20 bp, Glycine max
cgccactcagacgccttaaa

SEQ ID NO: 991 - DNA, 20 bp, Glycine max
gggcaggttctagcctttta

SEQ ID NO: 992 - DNA, 20 bp, Glycine max
attgccaaaaaaaaaggggc

SEQ ID NO: 993 - DNA, 20 bp, Glycine max
agatattgccaaaaaaaaag

SEQ ID NO: 994 - DNA, 20 bp, Glycine max
aagatattgccaaaaaaaaa

SEQ ID NO: 995 - DNA, 20 bp, Glycine max
aaagatattgccaaaaaaaa

SEQ ID NO: 996 - DNA, 20 bp, Glycine max
agaacctgcccctttttttt

SEQ ID NO: 997 - DNA, 20 bp, Glycine max
tttttatttatttatattat

SEQ ID NO: 998 - DNA, 20 bp, Glycine max
gtgtaagtgcaactgcttct

SEQ ID NO: 999 - DNA, 20 bp, Glycine max
acaggcatggtggtgggcaa

SEQ ID NO: 1000 - DNA, 20 bp, Glycine max
cacaatacaggcatggtggt

SEQ ID NO: 1001 - DNA, 20 bp, Glycine max
tcacaatacaggcatggtgg

SEQ ID NO: 1002 - DNA, 20 bp, Glycine max
aaatcacaatacaggcatgg

SEQ ID NO: 1003 - DNA, 20 bp, Glycine max
ctaaaatcacaatacaggca

SEQ ID NO: 1004 - DNA, 20 bp, Glycine max
gtgatctaaaatcacaatac

SEQ ID NO: 1005 - DNA, 20 bp, Glycine max
ttgataacacgaataataca

SEQ ID NO: 1006 - DNA, 20 bp, Glycine max
ttaaaaagtgaagaatagaa

SEQ ID NO: 1007 - DNA, 20 bp, Glycine max
tttttgtctaatgaatctaa

SEQ ID NO: 1008 - DNA, 20 bp, Glycine max
cattagacaaaaaaatgtca

SEQ ID NO: 1009 - DNA, 20 bp, Glycine max
aaaaaatgtcaaggttaatt

SEQ ID NO: 1010 - DNA, 20 bp, Glycine max
tagttaaagtttaaatcatt

SEQ ID NO: 1011 - DNA, 20 bp, Glycine max
tttcatcttcatatgatgat

SEQ ID NO: 1012 - DNA, 20 bp, Glycine max
catatgatgattggtaaact

SEQ ID NO: 1013 - DNA, 20 bp, Glycine max
aaaaactaaaaataaattga

SEQ ID NO: 1014 - DNA, 3017 bp, Glycine max
taaatcataataataaaaaaaaatatgatggcagcgatcaagacacgacaacatttcatttatttgaccgaggctgggtcacgaacgagtagcattccaaattgaaaatcgaaaaaaagaaaaggcgcagccgatcttagaccagagtatagtacatgtaccaaagaagtgtacctagtaggtgaagaagacaagttgaaaacaatcgccatcttaaaatcttttatttatttttttgactgaaaaaacaaacaactacagtactttttgagttttggaccattttgttaagtaaaatatggaaacatctgcatttaattcttgattcatttgtcactcttaatatattttcttgttccttaatgtcctctttaataggaagaataacaattttaacatgataaaaagggtggtaggcccacaagaattgaattgaatacaacaacaaaattccccataagtagagtatggtggagtagatgcttataaattggaatcttagaaggttgtttcctcaggccaagagcttggaaaattagcctcacaaaagcaaagatcaaacaaaccaaggacgagaacacgatgttgcttgaacttgcacttggtttattggttttggctctgtttctgcacttgcgtcccacacccactgcaaaatcaaaagcacttcgccatctcccaaacccaccaagcccaaagcctcgtcttcccttcataggacaccttcatctcttaaaagacaaacttctccactacgcactcatcgacctctccaaaaaacatggtcccttattctctctctactttggctccatgccaaccgttgttgcctccacaccagaattgttcaagctcttcctccaaacgcacgaggcaacttccttcaacacaaggttccaaacctcagccataagacgcctcacctatgatagctcagtggccatggttcccttcggaccttactggaagttcgtgaggaagctcatcatgaacgaccttctcaacgccaccactgtaaacaagttgaggcctttgaggacccaacagatccgcaagttccttagggttatggcccaaggcgcagaggcacagaagccccttgacttgaccgaggagcttctgaaatggaccaacagcaccatctccatgatgatgctcggcgaggctgaggagatcagagacatcgctcgcgaggttcttaagatctttggcgaatacagcctcactgacttcatctggccattgaagcatctcaaggttggaaagtatgagaagaggatcgacgacatcttgaacaagttcgaccctgtcgttgaaagggtcatcaagaagcgccgtgagatcgtgaggaggagaaagaacggagaggttgttgagggtgaggtcagcggggttttccttgacactttgcttgaattcgctgaggatgagaccatggagatcaaaatcaccaaggaccacatcaagggtcttgttgtcgtgagtttcctgcttcattcattgatcgaaatatgcagtattttgttaacaagagatcgagaattgacatttatatattcatgtggtggcaattaattaacggtacgcattcttaatcgatattgtgtatgtgcaggactttttctcggcaggaacagactccacagcggtggcaacagagtgggcattggcagaactcatcaacaatcctaaggtgttggaaaaggctcgtgaggaggtctacagtgttgtgggaaaggacagacttgtggacgaagttgacactcaaaaccttccttacattagagcaatcgtgaaggagacattccgcatgcacccgccactcccagtggtcaaaagaaagtgcacagaagagtgtgagattaatggatatgtgatcccagagggagcattgattctcttcaatgtatggcaagtaggaagagaccccaaatactgggacagaccatcggagttccgtcctgagaggttcctagagacaggggctgaaggggaagcagggcctcttgatcttaggggacaacattttcaacttctcccatttgggtctgggaggagaatgtgccctggagtcaatctggctacttcgggaatggcaacacttcttgcatctcttattcagtgcttcgacttgcaagtgctgggtccacaaggacagatattgaagggtggtgacgccaaagttagcatggaagagagagccggcctcactgttccaagggcacatagtcttgtctgtgttccacttgcaaggatcggcgttgcatctaaactcctttcttaattaagatcatcgtcatcatcatcatatgtaatatttactttttgtgtgttgataatcatcatttcaataaggtctcattcatctactttttatgaagtatataagcccttccatgcacattgtatcatctcccatttgtcttcgtttgctacctaaggcaatctttttttttttttgaatcacatcatctactataaactatcaatccttatattaattttgagttgccacatcatttatcccaatttcaatatttcattttcaatttataagatgagtaattcattccatctgtcctgtatcgtggttggattctagataagattcaaataattttaattttgtaaaactttctatcctccaaaataagttattgaaaattgctattccagtacaaagattggtgcccaaatgaagcctatacaaaaatacaagcaagctgcactaatttaaaaacaacaaaaacaactttgtaatttaccaagctactaaatcagtcccaaaaccatattgtttggcagatcacaggctccatcacagctctatgatatgtaaatatcaccatggtcccattgctttgtttgtcttaatttatttttgtaaataaataatatgaaaagaaatcgtacgcgtggcttgagggaagaacataactattgaatttcctttgatttcttcattggatttccttttatttcttttgtttctcagaaacttatcgaatctcttcaca

SEQ ID NO: 1015 - DNA, 1566 bp, Glycine max
atgttgcttgaacttgcacttggtttattggttttggctctgtttctgcacttgcgtcccacacccactgcaaaatcaaaagcacttcgccatctcccaaacccaccaagcccaaagcctcgtcttcccttcataggacaccttcatctcttaaaagacaaacttctccactacgcactcatcgacctctccaaaaaacatggtcccttattctctctctactttggctccatgccaaccgttgttgcctccacaccagaattgttcaagctcttcctccaaacgcacgaggcaacttccttcaacacaaggttccaaacctcagccataagacgcctcacctatgatagctcagtggccatggttcccttcggaccttactggaagttcgtgaggaagctcatcatgaacgaccttctcaacgccaccactgtaaacaagttgaggcctttgaggacccaacagatccgcaagttccttagggttatggcccaaggcgcagaggcacagaagccccttgacttgaccgaggagcttctgaaatggaccaacagcaccatctccatgatgatgctcggcgaggctgaggagatcagagacatcgctcgcgaggttcttaagatctttggcgaatacagcctcactgacttcatctggccattgaagcatctcaaggttggaaagtatgagaagaggatcgacgacatcttgaacaagttcgaccctgtcgttgaaagggtcatcaagaagcgccgtgagatcgtgaggaggagaaagaacggagaggttgttgagggtgaggtcagcggggttttccttgacactttgcttgaattcgctgaggatgagaccatggagatcaaaatcaccaaggaccacatcaagggtcttgttgtcgactttttctcggcaggaacagactccacagcggtggcaacagagtgggcattggcagaactcatcaacaatcctaaggtgttggaaaaggctcgtgaggaggtctacagtgttgtgggaaaggacagacttgtggacgaagttgacactcaaaaccttccttacattagagcaatcgtgaaggagacattccgcatgcacccgccactcccagtggtcaaaagaaagtgcacagaagagtgtgagattaatggatatgtgatcccagagggagcattgattctcttcaatgtatggcaagtaggaagagaccccaaatactgggacagaccatcggagttccgtcctgagaggttcctagagacaggggctgaaggggaagcagggcctcttgatcttaggggacaacattttcaacttctcccatttgggtctgggaggagaatgtgccctggagtcaatctggctacttcgggaatggcaacacttcttgcatctcttattcagtgcttcgacttgcaagtgctgggtccacaaggacagatattgaagggtggtgacgccaaagttagcatggaagagagagccggcctcactgttccaagggcacatagtcttgtctgtgttccacttgcaaggatcggcgttgcatctaaactcctttcttaa

SEQ ID NO: 1016 - protein, 520 aa, Glycine max
MLLELALGLLVLALFLHLRPTPTAKSKALRHLPNPPSPKPRLPFIGHLHLLKDKLLHYALIDLSKKHGPLFSLYFGSMPVVASTPELFKLFLQTHEATSFNTRFQTSAIRRLTYDSSVAMVPFGPYWKFVRKLIMNDLLNATTVNKLRPLRTQQIRKFLRVMAQGAEAQKPLDLTEELLKWTNSTISMMMLGEAEEIRDIAREVLKIFGEYSLTDFIWPLKHLKVGKYEKRIDDILNKFDPVVERVIKKRREIVRRRKNGEVVEGEVSGVFLDTLLEFAEDETMEIKITKDHIKGLVVDFFSAGTDSTAVATEWALAELINNPKVLEKAREEVYSVVGKDRLVDEVDTQNLPYIRAIVKETFRMHPPLPVVKRKCTEECEINGYVIPEGALILFNVWQVGRDPKYWDRPSEFRPERFLETGAEGEAGPLDLRGQHFQLLPFGSGRRMCPGVNLATSGMATLLASLIQCFDLQVLGPQGQILKGGDAKVSMEERAGLTVPRAHSLVCVPLARIGVASKLLS

SEQ ID NO: 1017 - DNA, 20 bp, Glycine max
aataataaaaaaaaatatga

SEQ ID NO: 1018 - DNA, 20 bp, Glycine max
acatttcatttatttgaccg

SEQ ID NO: 1019 - DNA, 20 bp, Glycine max
ttcatttatttgaccgaggc

SEQ ID NO: 1020 - DNA, 20 bp, Glycine max
tcatttatttgaccgaggct

SEQ ID NO: 1021 - DNA, 20 bp, Glycine max
actcgttcgtgacccagcct

SEQ ID NO: 1022 - DNA, 20 bp, Glycine max
ctttttttcgattttcaatt

SEQ ID NO: 1023 - DNA, 20 bp, Glycine max
tgaaaatcgaaaaaaagaaa

SEQ ID NO: 1024 - DNA, 20 bp, Glycine max
actatactctggtctaagat

SEQ ID NO: 1025 - DNA, 20 bp, Glycine max
ttggtacatgtactatactc

SEQ ID NO: 1026 - DNA, 20 bp, Glycine max
acctactaggtacacttctt

SEQ ID NO: 1027 - DNA, 20 bp, Glycine max
accaaagaagtgtacctagt

SEQ ID NO: 1028 - DNA, 20 bp, Glycine max
acttgtcttcttcacctact

SEQ ID NO: 1029 - DNA, 20 bp, Glycine max
ataaataaaagattttaaga

SEQ ID NO: 1030 - DNA, 20 bp, Glycine max
ctacagtactttttgagttt

SEQ ID NO: 1031 - DNA, 20 bp, Glycine max
ccatattttacttaacaaaa

SEQ ID NO: 1032 - DNA, 20 bp, Glycine max
ccattttgttaagtaaaata

SEQ ID NO: 1033 - DNA, 20 bp, Glycine max
tcctattaaagaggacatta

SEQ ID NO: 1034 - DNA, 20 bp, Glycine max
tgttattcttcctattaaag

SEQ ID NO: 1035 - DNA, 20 bp, Glycine max
tccttaatgtcctctttaat

SEQ ID NO: 1036 - DNA, 20 bp, Glycine max
acaattttaacatgataaaa

SEQ ID NO: 1037 - DNA, 20 bp, Glycine max
caattttaacatgataaaaa

SEQ ID NO: 1038 - DNA, 20 bp, Glycine max
ttttaacatgataaaaaggg

SEQ ID NO: 1039 - DNA, 20 bp, Glycine max
aacatgataaaaagggtggt

SEQ ID NO: 1040 - DNA, 20 bp, Glycine max
gtattcaattcaattcttgt

SEQ ID NO: 1041 - DNA, 20 bp, Glycine max
tgtattcaattcaattcttg

SEQ ID NO: 1042 - DNA, 20 bp, Glycine max
tccaccatactctacttatg

SEQ ID NO: 1043 - DNA, 20 bp, Glycine max
ctccaccatactctacttat

SEQ ID NO: 1044 - DNA, 20 bp, Glycine max
actccaccatactctactta

SEQ ID NO: 1045 - DNA, 20 bp, Glycine max
aattccccataagtagagta

SEQ ID NO: 1046 - DNA, 20 bp, Glycine max
tccccataagtagagtatgg

SEQ ID NO: 1047 - DNA, 20 bp, Glycine max
tggagtagatgcttataaat

SEQ ID NO: 1048 - DNA, 20 bp, Glycine max
ttataaattggaatcttaga

SEQ ID NO: 1049 - DNA, 20 bp, Glycine max
tcttagaaggttgtttcctc

SEQ ID NO: 1050 - DNA, 20 bp, Glycine max
ttttccaagctcttggcctg

SEQ ID NO: 1051 - DNA, 20 bp, Glycine max
gtttcctcaggccaagagct

SEQ ID NO: 1052 - DNA, 20 bp, Glycine max
aggctaattttccaagctct

SEQ ID NO: 1053 - DNA, 20 bp, Glycine max
gtttgatctttgcttttgtg

SEQ ID NO: 1054 - DNA, 20 bp, Glycine max
agcaaagatcaaacaaacca

SEQ ID NO: 1055 - DNA, 20 bp, Glycine max
caacatcgtgttctcgtcct

SEQ ID NO: 1056 - DNA, 20 bp, Glycine max
atgttgcttgaacttgcact

SEQ ID NO: 1057 - DNA, 20 bp, Glycine max
tgaacttgcacttggtttat

SEQ ID NO: 1058 - DNA, 20 bp, Glycine max
tgcacttggtttattggttt

SEQ ID NO: 1059 - DNA, 20 bp, Glycine max
tttgattttgcagtgggtgt

SEQ ID NO: 1060 - DNA, 20 bp, Glycine max
ttttgattttgcagtgggtg

SEQ ID NO: 1061 - DNA, 20 bp, Glycine max
agtgcttttgattttgcagt

SEQ ID NO: 1062 - DNA, 20 bp, Glycine max
aagtgcttttgattttgcag

SEQ ID NO: 1063 - DNA, 20 bp, Glycine max
ggcttggtgggtttgggaga

SEQ ID NO: 1064 - DNA, 20 bp, Glycine max
gctttgggcttggtgggttt

SEQ ID NO: 1065 - DNA, 20 bp, Glycine max
ggctttgggcttggtgggtt

SEQ ID NO: 1066 - DNA, 20 bp, Glycine max
gacgaggctttgggcttggt

SEQ ID NO: 1067 - DNA, 20 bp, Glycine max
agacgaggctttgggcttgg

SEQ ID NO: 1068 - DNA, 20 bp, Glycine max
ggaagacgaggctttgggct

SEQ ID NO: 1069 - DNA, 20 bp, Glycine max
tgaagggaagacgaggcttt

SEQ ID NO: 1070 - DNA, 20 bp, Glycine max
atgaagggaagacgaggctt

SEQ ID NO: 1071 - DNA, 20 bp, Glycine max
tgtcctatgaagggaagacg

SEQ ID NO: 1072 - DNA, 20 bp, Glycine max
aagcctcgtcttcccttcat

SEQ ID NO: 1073 - DNA, 20 bp, Glycine max
agatgaaggtgtcctatgaa

SEQ ID NO: 1074 - DNA, 20 bp, Glycine max
gagatgaaggtgtcctatga

SEQ ID NO: 1075 - DNA, 20 bp, Glycine max
gtttgtcttttaagagatga

SEQ ID NO: 1076 - DNA, 20 bp, Glycine max
agaggtcgatgagtgcgtag

SEQ ID NO: 1077 - DNA, 20 bp, Glycine max
agggaccatgttttttggag

SEQ ID NO: 1078 - DNA, 20 bp, Glycine max
gaataagggaccatgttttt

SEQ ID NO: 1079 - DNA, 20 bp, Glycine max
atcgacctctccaaaaaaca

SEQ ID NO: 1080 - DNA, 20 bp, Glycine max
ccaaagtagagagagaataa

SEQ ID NO: 1081 - DNA, 20 bp, Glycine max
gccaaagtagagagagaata

SEQ ID NO: 1082 - DNA, 20 bp, Glycine max
cccttattctctctctactt

SEQ ID NO: 1083 - DNA, 20 bp, Glycine max
ggaggcaacaacggttggca

SEQ ID NO: 1084 - DNA, 20 bp, Glycine max
ggtgtggaggcaacaacggt

SEQ ID NO: 1085 - DNA, 20 bp, Glycine max
ttctggtgtggaggcaacaa

SEQ ID NO: 1086 - DNA, 20 bp, Glycine max
cttgaacaattctggtgtgg

SEQ ID NO: 1087 - DNA, 20 bp, Glycine max
gagcttgaacaattctggtg

SEQ ID NO: 1088 - DNA, 20 bp, Glycine max
aggaagagcttgaacaattc

SEQ ID NO: 1089 - DNA, 20 bp, Glycine max
aagttgcctcgtgcgtttgg

SEQ ID NO: 1090 - DNA, 20 bp, Glycine max
aggaagttgcctcgtgcgtt

SEQ ID NO: 1091 - DNA, 20 bp, Glycine max
gctcttcctccaaacgcacg

SEQ ID NO: 1092 - DNA, 20 bp, Glycine max
ggtttggaaccttgtgttga

SEQ ID NO: 1093 - DNA, 20 bp, Glycine max
aggcaacttccttcaacaca

SEQ ID NO: 1094 - DNA, 20 bp, Glycine max
ggcgtcttatggctgaggtt

SEQ ID NO: 1095 - DNA, 20 bp, Glycine max
ggtgaggcgtcttatggctg

SEQ ID NO: 1096 - DNA, 20 bp, Glycine max
atcataggtgaggcgtctta

SEQ ID NO: 1097 - DNA, 20 bp, Glycine max
ccactgagctatcataggtg

SEQ ID NO: 1098 - DNA, 20 bp, Glycine max
catggccactgagctatcat

SEQ ID NO: 1099 - DNA, 20 bp, Glycine max
cctcacctatgatagctcag

SEQ ID NO: 1100 - DNA, 20 bp, Glycine max
ctatgatagctcagtggcca

SEQ ID NO: 1101 - DNA, 20 bp, Glycine max
gtaaggtccgaagggaacca

SEQ ID NO: 1102 - DNA, 20 bp, Glycine max
tcagtggccatggttccctt

SEQ ID NO: 1103 - DNA, 20 bp, Glycine max
aacttccagtaaggtccgaa

SEQ ID NO: 1104 - DNA, 20 bp, Glycine max
gaacttccagtaaggtccga

SEQ ID NO: 1105 - DNA, 20 bp, Glycine max
tggttcccttcggaccttac

SEQ ID NO: 1106 - DNA, 20 bp, Glycine max
ttcctcacgaacttccagta

SEQ ID NO: 1107 - DNA, 20 bp, Glycine max
gaccttactggaagttcgtg

SEQ ID NO: 1108 - DNA, 20 bp, Glycine max
ttacagtggtggcgttgaga

SEQ ID NO: 1109 - DNA, 20 bp, Glycine max
cctcaacttgtttacagtgg

SEQ ID NO: 1110 - DNA, 20 bp, Glycine max
aggcctcaacttgtttacag

SEQ ID NO: 1111 - DNA, 20 bp, Glycine max
ccaccactgtaaacaagttg

SEQ ID NO: 1112 - DNA, 20 bp, Glycine max
taaacaagttgaggcctttg

SEQ ID NO: 1113 - DNA, 20 bp, Glycine max
cggatctgttgggtcctcaa

SEQ ID NO: 1114 - DNA, 20 bp, Glycine max
aaggaacttgcggatctgtt

SEQ ID NO: 1115 - DNA, 20 bp, Glycine max
taaggaacttgcggatctgt

SEQ ID NO: 1116 - DNA, 20 bp, Glycine max
ccataaccctaaggaacttg

SEQ ID NO: 1117 - DNA, 20 bp, Glycine max
aacagatccgcaagttcctt

SEQ ID NO: 1118 - DNA, 20 bp, Glycine max
acagatccgcaagttcctta

SEQ ID NO: 1119 - DNA, 20 bp, Glycine max
cgccttgggccataacccta

SEQ ID NO: 1120 - DNA, 20 bp, Glycine max
ccgcaagttccttagggtta

SEQ ID NO: 1121 - DNA, 20 bp, Glycine max
ttccttagggttatggccca

SEQ ID NO: 1122 - DNA, 20 bp, Glycine max
cttctgtgcctctgcgcctt

SEQ ID NO: 1123 - DNA, 20 bp, Glycine max
gcttctgtgcctctgcgcct

SEQ ID NO: 1124 - DNA, 20 bp, Glycine max
ggttatggcccaaggcgcag

SEQ ID NO: 1125 - DNA, 20 bp, Glycine max
agctcctcggtcaagtcaag

SEQ ID NO: 1126 - DNA, 20 bp, Glycine max
aagctcctcggtcaagtcaa

SEQ ID NO: 1127 - DNA, 20 bp, Glycine max
gaagctcctcggtcaagtca

SEQ ID NO: 1128 - DNA, 20 bp, Glycine max
gaagccccttgacttgaccg

SEQ ID NO: 1129 - DNA, 20 bp, Glycine max
ggtccatttcagaagctcct

SEQ ID NO: 1130 - DNA, 20 bp, Glycine max
tgaccgaggagcttctgaaa

SEQ ID NO: 1131 - DNA, 20 bp, Glycine max
catcatggagatggtgctgt

SEQ ID NO: 1132 - DNA, 20 bp, Glycine max
gccgagcatcatcatggaga

SEQ ID NO: 1133 - DNA, 20 bp, Glycine max
agcctcgccgagcatcatca

SEQ ID NO: 1134 - DNA, 20 bp, Glycine max
accatctccatgatgatgct

SEQ ID NO: 1135 - DNA, 20 bp, Glycine max
ctccatgatgatgctcggcg

SEQ ID NO: 1136 - DNA, 20 bp, Glycine max
gatgatgctcggcgaggctg

SEQ ID NO: 1137 - DNA, 20 bp, Glycine max
gatcagagacatcgctcgcg

SEQ ID NO: 1138 - DNA, 20 bp, Glycine max
cgcgaggttcttaagatctt

SEQ ID NO: 1139 - DNA, 20 bp, Glycine max
atggccagatgaagtcagtg

SEQ ID NO: 1140 - DNA, 20 bp, Glycine max
acagcctcactgacttcatc

SEQ ID NO: 1141 - DNA, 20 bp, Glycine max
ccaaccttgagatgcttcaa

SEQ ID NO: 1142 - DNA, 20 bp, Glycine max
ctggccattgaagcatctca

SEQ ID NO: 1143 - DNA, 20 bp, Glycine max
ccattgaagcatctcaaggt

SEQ ID NO: 1144 - DNA, 20 bp, Glycine max
aggttggaaagtatgagaag

SEQ ID NO: 1145 - DNA, 20 bp, Glycine max
tgatgaccctttcaacgaca

SEQ ID NO: 1146 - DNA, 20 bp, Glycine max
ttgatgaccctttcaacgac

SEQ ID NO: 1147 - DNA, 20 bp, Glycine max
agttcgaccctgtcgttgaa

SEQ ID NO: 1148 - DNA, 20 bp, Glycine max
gttcgaccctgtcgttgaaa

SEQ ID NO: 1149 - DNA, 20 bp, Glycine max
ttctcctcctcacgatctca

SEQ ID NO: 1150 - DNA, 20 bp, Glycine max
agaagcgccgtgagatcgtg

SEQ ID NO: 1151 - DNA, 20 bp, Glycine max
agcgccgtgagatcgtgagg

SEQ ID NO: 1152 - DNA, 20 bp, Glycine max
atcgtgaggaggagaaagaa

SEQ ID NO: 1153 - DNA, 20 bp, Glycine max
gaggaggagaaagaacggag

SEQ ID NO: 1154 - DNA, 20 bp, Glycine max
aaagaacggagaggttgttg

SEQ ID NO: 1155 - DNA, 20 bp, Glycine max
aagaacggagaggttgttga

SEQ ID NO: 1156 - DNA, 20 bp, Glycine max
cggagaggttgttgagggtg

SEQ ID NO: 1157 - DNA, 20 bp, Glycine max
gttgttgagggtgaggtcag

SEQ ID NO: 1158 - DNA, 20 bp, Glycine max
ttgttgagggtgaggtcagc

SEQ ID NO: 1159 - DNA, 20 bp, Glycine max
tgttgagggtgaggtcagcg

SEQ ID NO: 1160 - DNA, 20 bp, Glycine max
cgaattcaagcaaagtgtca

SEQ ID NO: 1161 - DNA, 20 bp, Glycine max
cactttgcttgaattcgctg

SEQ ID NO: 1162 - DNA, 20 bp, Glycine max
attcgctgaggatgagacca

SEQ ID NO: 1163 - DNA, 20 bp, Glycine max
cttggtgattttgatctcca

SEQ ID NO: 1164 - DNA, 20 bp, Glycine max
catggagatcaaaatcacca

SEQ ID NO: 1165 - DNA, 20 bp, Glycine max
aagacccttgatgtggtcct

SEQ ID NO: 1166 - DNA, 20 bp, Glycine max
aatcaccaaggaccacatca

SEQ ID NO: 1167 - DNA, 20 bp, Glycine max
atcaccaaggaccacatcaa

SEQ ID NO: 1168 - DNA, 20 bp, Glycine max
cgacaacaagacccttgatg

SEQ ID NO: 1169 - DNA, 20 bp, Glycine max
tttcgatcaatgaatgaagc

SEQ ID NO: 1170 - DNA, 20 bp, Glycine max
ttgacatttatatattcatg

SEQ ID NO: 1171 - DNA, 20 bp, Glycine max
acatttatatattcatgtgg

SEQ ID NO: 1172 - DNA, 20 bp, Glycine max
atgtggtggcaattaattaa

SEQ ID NO: 1173 - DNA, 20 bp, Glycine max
aatcgatattgtgtatgtgc

SEQ ID NO: 1174 - DNA, 20 bp, Glycine max
gtatgtgcaggactttttct

SEQ ID NO: 1175 - DNA, 20 bp, Glycine max
gtgcaggactttttctcggc

SEQ ID NO: 1176 - DNA, 20 bp, Glycine max
ggcaggaacagactccacag

SEQ ID NO: 1177 - DNA, 20 bp, Glycine max
aggaacagactccacagcgg

SEQ ID NO: 1178 - DNA, 20 bp, Glycine max
ccactctgttgccaccgctg

SEQ ID NO: 1179 - DNA, 20 bp, Glycine max
ccacagcggtggcaacagag

SEQ ID NO: 1180 - DNA, 20 bp, Glycine max
cacagcggtggcaacagagt

SEQ ID NO: 1181 - DNA, 20 bp, Glycine max
ggtggcaacagagtgggcat

SEQ ID NO: 1182 - DNA, 20 bp, Glycine max
agaactcatcaacaatccta

SEQ ID NO: 1183 - DNA, 20 bp, Glycine max
cgagccttttccaacacctt

SEQ ID NO: 1184 - DNA, 20 bp, Glycine max
catcaacaatcctaaggtgt

SEQ ID NO: 1185 - DNA, 20 bp, Glycine max
caatcctaaggtgttggaaa

SEQ ID NO: 1186 - DNA, 20 bp, Glycine max
ggtgttggaaaaggctcgtg

SEQ ID NO: 1187 - DNA, 20 bp, Glycine max
gttggaaaaggctcgtgagg

SEQ ID NO: 1188 - DNA, 20 bp, Glycine max
tgaggaggtctacagtgttg

SEQ ID NO: 1189 - DNA, 20 bp, Glycine max
gaggaggtctacagtgttgt

SEQ ID NO: 1190 - DNA, 20 bp, Glycine max
ggtctacagtgttgtgggaa

SEQ ID NO: 1191 - DNA, 20 bp, Glycine max
tgtgggaaaggacagacttg

SEQ ID NO: 1192 - DNA, 20 bp, Glycine max
cgattgctctaatgtaagga

SEQ ID NO: 1193 - DNA, 20 bp, Glycine max
ttcacgattgctctaatgta

SEQ ID NO: 1194 - DNA, 20 bp, Glycine max
ttacattagagcaatcgtga

SEQ ID NO: 1195 - DNA, 20 bp, Glycine max
ctgggagtggcgggtgcatg

SEQ ID NO: 1196 - DNA, 20 bp, Glycine max
ttttgaccactgggagtggc

SEQ ID NO: 1197 - DNA, 20 bp, Glycine max
cttttgaccactgggagtgg

SEQ ID NO: 1198 - DNA, 20 bp, Glycine max
tttcttttgaccactgggag

SEQ ID NO: 1199 - DNA, 20 bp, Glycine max
catgcacccgccactcccag

SEQ ID NO: 1200 - DNA, 20 bp, Glycine max
tgcactttcttttgaccact

SEQ ID NO: 1201 - DNA, 20 bp, Glycine max
gtgcactttcttttgaccac

SEQ ID NO: 1202 - DNA, 20 bp, Glycine max
acagaagagtgtgagattaa

SEQ ID NO: 1203 - DNA, 20 bp, Glycine max
taatggatatgtgatcccag

SEQ ID NO: 1204 - DNA, 20 bp, Glycine max
aatggatatgtgatcccaga

SEQ ID NO: 1205 - DNA, 20 bp, Glycine max
agagaatcaatgctccctct

SEQ ID NO: 1206 - DNA, 20 bp, Glycine max
aagagaatcaatgctccctc

SEQ ID NO: 1207 - DNA, 20 bp, Glycine max
cattgattctcttcaatgta

SEQ ID NO: 1208 - DNA, 20 bp, Glycine max
ctcttcaatgtatggcaagt

SEQ ID NO: 1209 - DNA, 20 bp, Glycine max
atggtctgtcccagtatttg

SEQ ID NO: 1210 - DNA, 20 bp, Glycine max
taggaagagaccccaaatac

SEQ ID NO: 1211 - DNA, 20 bp, Glycine max
gatggtctgtcccagtattt

SEQ ID NO: 1212 - DNA, 20 bp, Glycine max
aggaagagaccccaaatact

SEQ ID NO: 1213 - DNA, 20 bp, Glycine max
cgatggtctgtcccagtatt

SEQ ID NO: 1214 - DNA, 20 bp, Glycine max
caaatactgggacagaccat

SEQ ID NO: 1215 - DNA, 20 bp, Glycine max
ctctcaggacggaactccga

SEQ ID NO: 1216 - DNA, 20 bp, Glycine max
tctctaggaacctctcagga

SEQ ID NO: 1217 - DNA, 20 bp, Glycine max
catcggagttccgtcctgag

SEQ ID NO: 1218 - DNA, 20 bp, Glycine max
cctgtctctaggaacctctc

SEQ ID NO: 1219 - DNA, 20 bp, Glycine max
cctgagaggttcctagagac

SEQ ID NO: 1220 - DNA, 20 bp, Glycine max
ccccttcagcccctgtctct

SEQ ID NO: 1221 - DNA, 20 bp, Glycine max
ctgagaggttcctagagaca

SEQ ID NO: 1222 - DNA, 20 bp, Glycine max
tgagaggttcctagagacag

SEQ ID NO: 1223 - DNA, 20 bp, Glycine max
ttcctagagacaggggctga

SEQ ID NO: 1224 - DNA, 20 bp, Glycine max
tcctagagacaggggctgaa

SEQ ID NO: 1225 - DNA, 20 bp, Glycine max
cctagagacaggggctgaag

SEQ ID NO: 1226 - DNA, 20 bp, Glycine max
acaggggctgaaggggaagc

SEQ ID NO: 1227 - DNA, 20 bp, Glycine max
caggggctgaaggggaagca

SEQ ID NO: 1228 - DNA, 20 bp, Glycine max
tgttgtcccctaagatcaag

SEQ ID NO: 1229 - DNA, 20 bp, Glycine max
aagcagggcctcttgatctt

SEQ ID NO: 1230 - DNA, 20 bp, Glycine max
agcagggcctcttgatctta

SEQ ID NO: 1231 - DNA, 20 bp, Glycine max
gcagggcctcttgatcttag

SEQ ID NO: 1232 - DNA, 20 bp, Glycine max
cattttcaacttctcccatt

SEQ ID NO: 1233 - DNA, 20 bp, Glycine max
attttcaacttctcccattt

SEQ ID NO: 1234 - DNA, 20 bp, Glycine max
ttctcctcccagacccaaat

SEQ ID NO: 1235 - DNA, 20 bp, Glycine max
attctcctcccagacccaaa

SEQ ID NO: 1236 - DNA, 20 bp, Glycine max
caacttctcccatttgggtc

SEQ ID NO: 1237 - DNA, 20 bp, Glycine max
aacttctcccatttgggtct

SEQ ID NO: 1238 - DNA, 20 bp, Glycine max
ttctcccatttgggtctggg

SEQ ID NO: 1239 - DNA, 20 bp, Glycine max
tctgggaggagaatgtgccc

SEQ ID NO: 1240 - DNA, 20 bp, Glycine max
aagtagccagattgactcca

SEQ ID NO: 1241 - DNA, 20 bp, Glycine max
gaagtagccagattgactcc

SEQ ID NO: 1242 - DNA, 20 bp, Glycine max
aatgtgccctggagtcaatc

SEQ ID NO: 1243 - DNA, 20 bp, Glycine max
tggagtcaatctggctactt

SEQ ID NO: 1244 - DNA, 20 bp, Glycine max
ggagtcaatctggctacttc

SEQ ID NO: 1245 - DNA, 20 bp, Glycine max
caatctggctacttcgggaa

SEQ ID NO: 1246 - DNA, 20 bp, Glycine max
gtgcttcgacttgcaagtgc

SEQ ID NO: 1247 - DNA, 20 bp, Glycine max
tgcttcgacttgcaagtgct

SEQ ID NO: 1248 - DNA, 20 bp, Glycine max
ttgcaagtgctgggtccaca

SEQ ID NO: 1249 - DNA, 20 bp, Glycine max
cccttcaatatctgtccttg

SEQ ID NO: 1250 - DNA, 20 bp, Glycine max
tccacaaggacagatattga

SEQ ID NO: 1251 - DNA, 20 bp, Glycine max
ccacaaggacagatattgaa

SEQ ID NO: 1252 - DNA, 20 bp, Glycine max
caaggacagatattgaaggg

SEQ ID NO: 1253 - DNA, 20 bp, Glycine max
tctctcttccatgctaactt

SEQ ID NO: 1254 - DNA, 20 bp, Glycine max
tggtgacgccaaagttagca

SEQ ID NO: 1255 - DNA, 20 bp, Glycine max
gttagcatggaagagagagc

SEQ ID NO: 1256 - DNA, 20 bp, Glycine max
tgcccttggaacagtgaggc

SEQ ID NO: 1257 - DNA, 20 bp, Glycine max
tatgtgcccttggaacagtg

SEQ ID NO: 1258 - DNA, 20 bp, Glycine max
gagccggcctcactgttcca

SEQ ID NO: 1259 - DNA, 20 bp, Glycine max
agccggcctcactgttccaa

SEQ ID NO: 1260 - DNA, 20 bp, Glycine max
cagacaagactatgtgccct

SEQ ID NO: 1261 - DNA, 20 bp, Glycine max
ttgtctgtgttccacttgca

SEQ ID NO: 1262 - DNA, 20 bp, Glycine max
gcaacgccgatccttgcaag

SEQ ID NO: 1263 - DNA, 20 bp, Glycine max
tgtgttccacttgcaaggat

SEQ ID NO: 1264 - DNA, 20 bp, Glycine max
acgatgatcttaattaagaa

SEQ ID NO: 1265 - DNA, 20 bp, Glycine max
tgataatcatcatttcaata

SEQ ID NO: 1266 - DNA, 20 bp, Glycine max
atgatacaatgtgcatggaa

SEQ ID NO: 1267 - DNA, 20 bp, Glycine max
gatgatacaatgtgcatgga

SEQ ID NO: 1268 - DNA, 20 bp, Glycine max
gggagatgatacaatgtgca

SEQ ID NO: 1269 - DNA, 20 bp, Glycine max
ggtagcaaacgaagacaaat

SEQ ID NO: 1270 - DNA, 20 bp, Glycine max
aggtagcaaacgaagacaaa

SEQ ID NO: 1271 - DNA, 20 bp, Glycine max
ttgtcttcgtttgctaccta

SEQ ID NO: 1272 - DNA, 20 bp, Glycine max
aaaaaaaaaaagattgcctt

SEQ ID NO: 1273 - DNA, 20 bp, Glycine max
ggcaactcaaaattaatata

SEQ ID NO: 1274 - DNA, 20 bp, Glycine max
tgaaattgggataaatgatg

SEQ ID NO: 1275 - DNA, 20 bp, Glycine max
gaaaatgaaatattgaaatt

SEQ ID NO: 1276 - DNA, 20 bp, Glycine max
tgaaaatgaaatattgaaat

SEQ ID NO: 1277 - DNA, 20 bp, Glycine max
caaccacgatacaggacaga

SEQ ID NO: 1278 - DNA, 20 bp, Glycine max
attccatctgtcctgtatcg

SEQ ID NO: 1279 - DNA, 20 bp, Glycine max
ctagaatccaaccacgatac

SEQ ID NO: 1280 - DNA, 20 bp, Glycine max
catctgtcctgtatcgtggt

SEQ ID NO: 1281 - DNA, 20 bp, Glycine max
ttttcaataacttattttgg

SEQ ID NO: 1282 - DNA, 20 bp, Glycine max
caattttcaataacttattt

SEQ ID NO: 1283 - DNA, 20 bp, Glycine max
ttgggcaccaatctttgtac

SEQ ID NO: 1284 - DNA, 20 bp, Glycine max
tgctattccagtacaaagat

SEQ ID NO: 1285 - DNA, 20 bp, Glycine max
tttttgtataggcttcattt

SEQ ID NO: 1286 - DNA, 20 bp, Glycine max
atttttgtataggcttcatt

SEQ ID NO: 1287 - DNA, 20 bp, Glycine max
gcttgcttgtatttttgtat

SEQ ID NO: 1288 - DNA, 20 bp, Glycine max
ttgggactgatttagtagct

SEQ ID NO: 1289 - DNA, 20 bp, Glycine max
ctgccaaacaatatggtttt

SEQ ID NO: 1290 - DNA, 20 bp, Glycine max
tctgccaaacaatatggttt

SEQ ID NO: 1291 - DNA, 20 bp, Glycine max
ctgtgatctgccaaacaata

SEQ ID NO: 1292 - DNA, 20 bp, Glycine max
agtcccaaaaccatattgtt

SEQ ID NO: 1293 - DNA, 20 bp, Glycine max
catattgtttggcagatcac

SEQ ID NO: 1294 - DNA, 20 bp, Glycine max
tacatatcatagagctgtga

SEQ ID NO: 1295 - DNA, 20 bp, Glycine max
atgatatgtaaatatcacca

SEQ ID NO: 1296 - DNA, 20 bp, Glycine max
caaacaaagcaatgggacca

SEQ ID NO: 1297 - DNA, 20 bp, Glycine max
attaagacaaacaaagcaat

SEQ ID NO: 1298 - DNA, 20 bp, Glycine max
aattaagacaaacaaagcaa

SEQ ID NO: 1299 - DNA, 20 bp, Glycine max
atgaaaagaaatcgtacgcg

SEQ ID NO: 1300 - DNA, 20 bp, Glycine max
gaaatcgtacgcgtggcttg

SEQ ID NO: 1301 - DNA, 20 bp, Glycine max
aaatcgtacgcgtggcttga

SEQ ID NO: 1302 - DNA, 20 bp, Glycine max
aaatccaatgaagaaatcaa

SEQ ID NO: 1303 - DNA, 20 bp, Glycine max
atttcctttgatttcttcat

SEQ ID NO: 1304 - DNA, 20 bp, Glycine max
tgagaaacaaaagaaataaa

SEQ ID NO: 1305 - DNA, 2752 bp, Glycine max
ttggaataatttatttagctatagaatttgtgtttgatttatcttgtgtgtgtaaaattatttttggatcaatgacacactcgtatgtttgtacgagataaatttttaacctaatggaactaagaaaaatttgtggctcctgacccaaaacaaaaaaatatatatctaaatttgatttcaggtacccaaatgttgtttttttttataagtattcatttgtccttatcgaatgataactagcgagaacaactcagctcaactttgaatgataattttaagtgtctcctacagaaaatgattaaaacaagaaggatggtccaaaagtatctaataggccatctcgatctcatctgaccaagcttcctggttagttcctttgaattgaataatataaaaaaaagaagatgatggatgtgggtagagctcagtataacccacctacctccaattgctgacttttcaaaggccaaacatgaagaaatgttgcagtataaaaaggggtgcccttcagttatgtccatcaacaaatattggaatactacactatacttgtcaaccctttgagagttagaatggctgctgctattgaaatccccacaatagtgtttccaaactcctctgcccaacagaggatgccagtggttggaatgggatctgcccctgacttcacatgcaagaaagacacaaaggaggctatcattgaggccgtgaaacagggttacagacacttcgacactgctgctgcttatggctctgaacaggctctcggtgaagctctcaaggaagctatccatcttggcctcgtctcccgccaagacctctttgtcacttccaagctttgggtcaccgaaaatcatcctcatcttgtccttcctgctttgcgcaatcacttaagtgagcatttttttcacactaaaacttctttgattttaagtttgataattatttctcaatacaaaagcgatgttatatatgtttttatatgtggagctagccattagaaaataaattcaatactaattctcagttaagcaactttaagtaatatttgtgttcgatccaaaaattttcatttcagtgtttctccgcctaatttaattttaaaataaaaacattcaaacatatattatatcaattcaaaaatcagttccattcaaaattttgtcaactttcaaacaagtgtattctgacttctataaaagctctcttgtaaaagtttatatacatatataacttaattatatatgctataactctgtctgattcattttacttcaaatatatatatatatatatatatatatatatatatatatatatatatatatatatatatatatatatatatatatatatcaatgcttttacttacataaactttttgtcgtgcagaactcttcaactagagtacttggacctgtatctcatccactggcccctgagttctcagccagggaagttctcatttccaattgaagtagaagatctcttgccttttgacgtgaagggtgtgtgggaatccatggaagagtgccagaaacttggcctcaccaaagccattggagtcagcaacttctctgtcaagaagcttcagaatctgctctctgttgctaccatccgtcccgtggtcgatcaagtaagcctctctctctctctttctctgtgtgttgtatttagttttgtttatgcgaatggttgatgataagaagaattactactgttacaggtggagatgaaccttgcatggcaacagaagaagctaagagagttctgcaaagaaaatgggataatagtgactgcgttctctccactgaggaaaggtgcgagcaggggcccaaatgaagtgatggagaatgatgtgctgaaggagattgcagaggctcatgggaaatccatagcccaggtgagtctgagatggttgtacgaacaaggtgtgacatttgtgccaaagagctacgataaggagaggatgaaccagaatctgcacatctttgactgggcattgactgaacaagatcatcacaaaataagtcaaatcagccagagccgtttgatcagcggacccaccaaaccacaactcgctgatctctgggatgatcaaatataaactatttactactatgcagctcccactctatttttataatccatctttttacctcttgtttcattttacgtttaaataattcatgccatgccacttcttattttagatttcacaatcaataaactaggcacgcgcggcacatgatatgaataaactatgttcaatttttttttcttctcttagtccttctatttattaaaagaaaaaaaaatcttgattaattgaaattcgattaaaaaataagtaaaatttaataaaaaataatttccgtaaaaaattgaacctaaatattattaaaacaatttaactttaacttcagtgtattaattaattgtttaacccatttgcaatttgatcttaattactaatggatgatattgaaagatgattttacactaagattaagttaaatttatattaatctaattatacaatctatacactttgctgcaagtttctatggtaaaggcccaggcttcaaattttgcgataaggtatgaccaattatttaaaggagtggttgatcagctctactatttctagtgtcgttttatcaataaaaaattcaatcaatcttgtttgttaagaatcggctacaccatataagtttttttttttttttttttttacattcaacatattaag

SEQ ID NO: 1306 - DNA, 951 bp, Glycine max
atggctgctgctattgaaatccccacaatagtgtttccaaactcctctgcccaacagaggatgccagtggttggaatgggatctgcccctgacttcacatgcaagaaagacacaaaggaggctatcattgaggccgtgaaacagggttacagacacttcgacactgctgctgcttatggctctgaacaggctctcggtgaagctctcaaggaagctatccatcttggcctcgtctcccgccaagacctctttgtcacttccaagctttgggtcaccgaaaatcatcctcatcttgtccttcctgctttgcgcaatcacttaagtgaaactcttcaactagagtacttggacctgtatctcatccactggcccctgagttctcagccagggaagttctcatttccaattgaagtagaagatctcttgccttttgacgtgaagggtgtgtgggaatccatggaagagtgccagaaacttggcctcaccaaagccattggagtcagcaacttctctgtcaagaagcttcagaatctgctctctgttgctaccatccgtcccgtggtcgatcaagtggagatgaaccttgcatggcaacagaagaagctaagagagttctgcaaagaaaatgggataatagtgactgcgttctctccactgaggaaaggtgcgagcaggggcccaaatgaagtgatggagaatgatgtgctgaaggagattgcagaggctcatgggaaatccatagcccaggtgagtctgagatggttgtacgaacaaggtgtgacatttgtgccaaagagctacgataaggagaggatgaaccagaatctgcacatctttgactgggcattgactgaacaagatcatcacaaaataagtcaaatcagccagagccgtttgatcagcggacccaccaaaccacaactcgctgatctctgggatgatcaaatataa

SEQ ID NO: 1307 - protein, 316 aa, Glycine max
MAAAIEIPTIVFPNSSAQQRMPVVGMGSAPDFTCKKDTKEAIIEAVKQGYRHFDTAAAYGSEQALGEALKEAIHLGLVSRQDLFVTSKLWVTENHPHLVLPALRNHLSETLQLEYLDLYLIHWPLSSQPGKFSFPIEVEDLLPFDVKGVWESMEECQKLGLTKAIGVSNFSVKKLQNLLSVATIRPVVDQVEMNLAWQQKKLREFCKENGIIVTAFSPLRKGASRGPNEVMENDVLKEIAEAHGKSIAQVSLRWLYEQGVTFVPKSYDKERMNQNLHIFDWALTEQDHHKISQISQSRLISGPTKPQLADLWDDQI

SEQ ID NO: 1308 - DNA, 20 bp, Glycine max
tgtgtgtgtaaaattatttt

SEQ ID NO: 1309 - DNA, 20 bp, Glycine max
gagataaatttttaacctaa

SEQ ID NO: 1310 - DNA, 20 bp, Glycine max
aaatttttcttagttccatt

SEQ ID NO: 1311 - DNA, 20 bp, Glycine max
atggaactaagaaaaatttg

SEQ ID NO: 1312 - DNA, 20 bp, Glycine max
atatttttttgttttgggtc

SEQ ID NO: 1313 - DNA, 20 bp, Glycine max
gatatatatttttttgtttt

SEQ ID NO: 1314 - DNA, 20 bp, Glycine max
agatatatatttttttgttt

SEQ ID NO: 1315 - DNA, 20 bp, Glycine max
atatatctaaatttgatttc

SEQ ID NO: 1316 - DNA, 20 bp, Glycine max
tataaaaaaaaacaacattt

SEQ ID NO: 1317 - DNA, 20 bp, Glycine max
ttataaaaaaaaacaacatt

SEQ ID NO: 1318 - DNA, 20 bp, Glycine max
tcgctagttatcattcgata

SEQ ID NO: 1319 - DNA, 20 bp, Glycine max
ttgttttaatcattttctgt

SEQ ID NO: 1320 - DNA, 20 bp, Glycine max
agaaaatgattaaaacaaga

SEQ ID NO: 1321 - DNA, 20 bp, Glycine max
aatgattaaaacaagaagga

SEQ ID NO: 1322 - DNA, 20 bp, Glycine max
gatggcctattagatacttt

SEQ ID NO: 1323 - DNA, 20 bp, Glycine max
atggtccaaaagtatctaat

SEQ ID NO: 1324 - DNA, 20 bp, Glycine max
ttggtcagatgagatcgaga

SEQ ID NO: 1325 - DNA, 20 bp, Glycine max
aaggaactaaccaggaagct

SEQ ID NO: 1326 - DNA, 20 bp, Glycine max
tctcatctgaccaagcttcc

SEQ ID NO: 1327 - DNA, 20 bp, Glycine max
tcaattcaaaggaactaacc

SEQ ID NO: 1328 - DNA, 20 bp, Glycine max
ttttatattattcaattcaa

SEQ ID NO: 1329 - DNA, 20 bp, Glycine max
atataaaaaaaagaagatga

SEQ ID NO: 1330 - DNA, 20 bp, Glycine max
aaaaaagaagatgatggatg

SEQ ID NO: 1331 - DNA, 20 bp, Glycine max
aaaaagaagatgatggatgt

SEQ ID NO: 1332 - DNA, 20 bp, Glycine max
gtcagcaattggaggtaggt

SEQ ID NO: 1333 - DNA, 20 bp, Glycine max
agtcagcaattggaggtagg

SEQ ID NO: 1334 - DNA, 20 bp, Glycine max
aaaagtcagcaattggaggt

SEQ ID NO: 1335 - DNA, 20 bp, Glycine max
tttgaaaagtcagcaattgg

SEQ ID NO: 1336 - DNA, 20 bp, Glycine max
gcctttgaaaagtcagcaat

SEQ ID NO: 1337 - DNA, 20 bp, Glycine max
tccaattgctgacttttcaa

SEQ ID NO: 1338 - DNA, 20 bp, Glycine max
ctgcaacatttcttcatgtt

SEQ ID NO: 1339 - DNA, 20 bp, Glycine max
agaaatgttgcagtataaaa

SEQ ID NO: 1340 - DNA, 20 bp, Glycine max
gaaatgttgcagtataaaaa

SEQ ID NO: 1341 - DNA, 20 bp, Glycine max
aaatgttgcagtataaaaag

SEQ ID NO: 1342 - DNA, 20 bp, Glycine max
tgttgatggacataactgaa

SEQ ID NO: 1343 - DNA, 20 bp, Glycine max
ttgttgatggacataactga

SEQ ID NO: 1344 - DNA, 20 bp, Glycine max
agtattccaatatttgttga

SEQ ID NO: 1345 - DNA, 20 bp, Glycine max
ttatgtccatcaacaaatat

SEQ ID NO: 1346 - DNA, 20 bp, Glycine max
cagccattctaactctcaaa

SEQ ID NO: 1347 - DNA, 20 bp, Glycine max
gcagccattctaactctcaa

SEQ ID NO: 1348 - DNA, 20 bp, Glycine max
caaccctttgagagttagaa

SEQ ID NO: 1349 - DNA, 20 bp, Glycine max
agtttggaaacactattgtg

SEQ ID NO: 1350 - DNA, 20 bp, Glycine max
gagtttggaaacactattgt

SEQ ID NO: 1351 - DNA, 20 bp, Glycine max
ggagtttggaaacactattg

SEQ ID NO: 1352 - DNA, 20 bp, Glycine max
ctctgttgggcagaggagtt

SEQ ID NO: 1353 - DNA, 20 bp, Glycine max
tggcatcctctgttgggcag

SEQ ID NO: 1354 - DNA, 20 bp, Glycine max
caaactcctctgcccaacag

SEQ ID NO: 1355 - DNA, 20 bp, Glycine max
aaccactggcatcctctgtt

SEQ ID NO: 1356 - DNA, 20 bp, Glycine max
caaccactggcatcctctgt

SEQ ID NO: 1357 - DNA, 20 bp, Glycine max
tgcccaacagaggatgccag

SEQ ID NO: 1358 - DNA, 20 bp, Glycine max
caacagaggatgccagtggt

SEQ ID NO: 1359 - DNA, 20 bp, Glycine max
gcagatcccattccaaccac

SEQ ID NO: 1360 - DNA, 20 bp, Glycine max
gaggatgccagtggttggaa

SEQ ID NO: 1361 - DNA, 20 bp, Glycine max
aggatgccagtggttggaat

SEQ ID NO: 1362 - DNA, 20 bp, Glycine max
tttcttgcatgtgaagtcag

SEQ ID NO: 1363 - DNA, 20 bp, Glycine max
ctttcttgcatgtgaagtca

SEQ ID NO: 1364 - DNA, 20 bp, Glycine max
tctttcttgcatgtgaagtc

SEQ ID NO: 1365 - DNA, 20 bp, Glycine max
cacatgcaagaaagacacaa

SEQ ID NO: 1366 - DNA, 20 bp, Glycine max
atgcaagaaagacacaaagg

SEQ ID NO: 1367 - DNA, 20 bp, Glycine max
cacaaaggaggctatcattg

SEQ ID NO: 1368 - DNA, 20 bp, Glycine max
tatcattgaggccgtgaaac

SEQ ID NO: 1369 - DNA, 20 bp, Glycine max
gtgtctgtaaccctgtttca

SEQ ID NO: 1370 - DNA, 20 bp, Glycine max
atcattgaggccgtgaaaca

SEQ ID NO: 1371 - DNA, 20 bp, Glycine max
ttcgacactgctgctgctta

SEQ ID NO: 1372 - DNA, 20 bp, Glycine max
tgctgcttatggctctgaac

SEQ ID NO: 1373 - DNA, 20 bp, Glycine max
tatggctctgaacaggctct

SEQ ID NO: 1374 - DNA, 20 bp, Glycine max
ggctctcggtgaagctctca

SEQ ID NO: 1375 - DNA, 20 bp, Glycine max
ctcaaggaagctatccatct

SEQ ID NO: 1376 - DNA, 20 bp, Glycine max
ggcgggagacgaggccaaga

SEQ ID NO: 1377 - DNA, 20 bp, Glycine max
agaggtcttggcgggagacg

SEQ ID NO: 1378 - DNA, 20 bp, Glycine max
agtgacaaagaggtcttggc

SEQ ID NO: 1379 - DNA, 20 bp, Glycine max
aagtgacaaagaggtcttgg

SEQ ID NO: 1380 - DNA, 20 bp, Glycine max
tggaagtgacaaagaggtct

SEQ ID NO: 1381 - DNA, 20 bp, Glycine max
aaagcttggaagtgacaaag

SEQ ID NO: 1382 - DNA, 20 bp, Glycine max
tctttgtcacttccaagctt

SEQ ID NO: 1383 - DNA, 20 bp, Glycine max
ctttgtcacttccaagcttt

SEQ ID NO: 1384 - DNA, 20 bp, Glycine max
attttcggtgacccaaagct

SEQ ID NO: 1385 - DNA, 20 bp, Glycine max
gacaagatgaggatgatttt

SEQ ID NO: 1386 - DNA, 20 bp, Glycine max
aaagcaggaaggacaagatg

SEQ ID NO: 1387 - DNA, 20 bp, Glycine max
agtgattgcgcaaagcagga

SEQ ID NO: 1388 - DNA, 20 bp, Glycine max
cttaagtgattgcgcaaagc

SEQ ID NO: 1389 - DNA, 20 bp, Glycine max
gttatatatgtttttatatg

SEQ ID NO: 1390 - DNA, 20 bp, Glycine max
gtattgaatttattttctaa

SEQ ID NO: 1391 - DNA, 20 bp, Glycine max
aacactgaaatgaaaatttt

SEQ ID NO: 1392 - DNA, 20 bp, Glycine max
tattttaaaattaaattagg

SEQ ID NO: 1393 - DNA, 20 bp, Glycine max
ttttattttaaaattaaatt

SEQ ID NO: 1394 - DNA, 20 bp, Glycine max
aaagttgacaaaattttgaa

SEQ ID NO: 1395 - DNA, 20 bp, Glycine max
aactcttcaactagagtact

SEQ ID NO: 1396 - DNA, 20 bp, Glycine max
ggggccagtggatgagatac

SEQ ID NO: 1397 - DNA, 20 bp, Glycine max
tggacctgtatctcatccac

SEQ ID NO: 1398 - DNA, 20 bp, Glycine max
gctgagaactcaggggccag

SEQ ID NO: 1399 - DNA, 20 bp, Glycine max
ttccctggctgagaactcag

SEQ ID NO: 1400 - DNA, 20 bp, Glycine max
cttccctggctgagaactca

SEQ ID NO: 1401 - DNA, 20 bp, Glycine max
acttccctggctgagaactc

SEQ ID NO: 1402 - DNA, 20 bp, Glycine max
tggcccctgagttctcagcc

SEQ ID NO: 1403 - DNA, 20 bp, Glycine max
ggcccctgagttctcagcca

SEQ ID NO: 1404 - DNA, 20 bp, Glycine max
attggaaatgagaacttccc

SEQ ID NO: 1405 - DNA, 20 bp, Glycine max
aagagatcttctacttcaat

SEQ ID NO: 1406 - DNA, 20 bp, Glycine max
cacacacccttcacgtcaaa

SEQ ID NO: 1407 - DNA, 20 bp, Glycine max
tctcttgccttttgacgtga

SEQ ID NO: 1408 - DNA, 20 bp, Glycine max
ctcttgccttttgacgtgaa

SEQ ID NO: 1409 - DNA, 20 bp, Glycine max
cttttgacgtgaagggtgtg

SEQ ID NO: 1410 - DNA, 20 bp, Glycine max
ttttgacgtgaagggtgtgt

SEQ ID NO: 1411 - DNA, 20 bp, Glycine max
gaagggtgtgtgggaatcca

SEQ ID NO: 1412 - DNA, 20 bp, Glycine max
aagtttctggcactcttcca

SEQ ID NO: 1413 - DNA, 20 bp, Glycine max
atggaagagtgccagaaact

SEQ ID NO: 1414 - DNA, 20 bp, Glycine max
ctttggtgaggccaagtttc

SEQ ID NO: 1415 - DNA, 20 bp, Glycine max
tgactccaatggctttggtg

SEQ ID NO: 1416 - DNA, 20 bp, Glycine max
gttgctgactccaatggctt

SEQ ID NO: 1417 - DNA, 20 bp, Glycine max
cttggcctcaccaaagccat

SEQ ID NO: 1418 - DNA, 20 bp, Glycine max
agagaagttgctgactccaa

SEQ ID NO: 1419 - DNA, 20 bp, Glycine max
ttgatcgaccacgggacgga

SEQ ID NO: 1420 - DNA, 20 bp, Glycine max
tgttgctaccatccgtcccg

SEQ ID NO: 1421 - DNA, 20 bp, Glycine max
ttacttgatcgaccacggga

SEQ ID NO: 1422 - DNA, 20 bp, Glycine max
aggcttacttgatcgaccac

SEQ ID NO: 1423 - DNA, 20 bp, Glycine max
gaggcttacttgatcgacca

SEQ ID NO: 1424 - DNA, 20 bp, Glycine max
acagagaaagagagagagag

SEQ ID NO: 1425 - DNA, 20 bp, Glycine max
tttagttttgtttatgcgaa

SEQ ID NO: 1426 - DNA, 20 bp, Glycine max
agaagaattactactgttac

SEQ ID NO: 1427 - DNA, 20 bp, Glycine max
agaattactactgttacagg

SEQ ID NO: 1428 - DNA, 20 bp, Glycine max
aggtggagatgaaccttgca

SEQ ID NO: 1429 - DNA, 20 bp, Glycine max
gcttcttctgttgccatgca

SEQ ID NO: 1430 - DNA, 20 bp, Glycine max
agagagttctgcaaagaaaa

SEQ ID NO: 1431 - DNA, 20 bp, Glycine max
gagagttctgcaaagaaaat

SEQ ID NO: 1432 - DNA, 20 bp, Glycine max
tgactgcgttctctccactg

SEQ ID NO: 1433 - DNA, 20 bp, Glycine max
ctgctcgcacctttcctcag

SEQ ID NO: 1434 - DNA, 20 bp, Glycine max
gcgttctctccactgaggaa

SEQ ID NO: 1435 - DNA, 20 bp, Glycine max
cactgaggaaaggtgcgagc

SEQ ID NO: 1436 - DNA, 20 bp, Glycine max
actgaggaaaggtgcgagca

SEQ ID NO: 1437 - DNA, 20 bp, Glycine max
ctgaggaaaggtgcgagcag

SEQ ID NO: 1438 - DNA, 20 bp, Glycine max
cattctccatcacttcattt

SEQ ID NO: 1439 - DNA, 20 bp, Glycine max
tcattctccatcacttcatt

SEQ ID NO: 1440 - DNA, 20 bp, Glycine max
caggggcccaaatgaagtga

SEQ ID NO: 1441 - DNA, 20 bp, Glycine max
gatggagaatgatgtgctga

SEQ ID NO: 1442 - DNA, 20 bp, Glycine max
tgtgctgaaggagattgcag

SEQ ID NO: 1443 - DNA, 20 bp, Glycine max
aaggagattgcagaggctca

SEQ ID NO: 1444 - DNA, 20 bp, Glycine max
aggagattgcagaggctcat

SEQ ID NO: 1445 - DNA, 20 bp, Glycine max
tcatgggaaatccatagccc

SEQ ID NO: 1446 - DNA, 20 bp, Glycine max
tctcagactcacctgggcta

SEQ ID NO: 1447 - DNA, 20 bp, Glycine max
caaccatctcagactcacct

SEQ ID NO: 1448 - DNA, 20 bp, Glycine max
acaaccatctcagactcacc

SEQ ID NO: 1449 - DNA, 20 bp, Glycine max
tagcccaggtgagtctgaga

SEQ ID NO: 1450 - DNA, 20 bp, Glycine max
ctgagatggttgtacgaaca

SEQ ID NO: 1451 - DNA, 20 bp, Glycine max
ctctccttatcgtagctctt

SEQ ID NO: 1452 - DNA, 20 bp, Glycine max
tgtgccaaagagctacgata

SEQ ID NO: 1453 - DNA, 20 bp, Glycine max
caaagagctacgataaggag

SEQ ID NO: 1454 - DNA, 20 bp, Glycine max
agtcaaagatgtgcagattc

SEQ ID NO: 1455 - DNA, 20 bp, Glycine max
agaatctgcacatctttgac

SEQ ID NO: 1456 - DNA, 20 bp, Glycine max
gaatctgcacatctttgact

SEQ ID NO: 1457 - DNA, 20 bp, Glycine max
gtccgctgatcaaacggctc

SEQ ID NO: 1458 - DNA, 20 bp, Glycine max
tggtgggtccgctgatcaaa

SEQ ID NO: 1459 - DNA, 20 bp, Glycine max
agccagagccgtttgatcag

SEQ ID NO: 1460 - DNA, 20 bp, Glycine max
tcagcgagttgtggtttggt

SEQ ID NO: 1461 - DNA, 20 bp, Glycine max
atcagcgagttgtggtttgg

SEQ ID NO: 1462 - DNA, 20 bp, Glycine max
gagatcagcgagttgtggtt

SEQ ID NO: 1463 - DNA, 20 bp, Glycine max
tcccagagatcagcgagttg

SEQ ID NO: 1464 - DNA, 20 bp, Glycine max
aaccacaactcgctgatctc

SEQ ID NO: 1465 - DNA, 20 bp, Glycine max
accacaactcgctgatctct

SEQ ID NO: 1466 - DNA, 20 bp, Glycine max
atggattataaaaatagagt

SEQ ID NO: 1467 - DNA, 20 bp, Glycine max
gatggattataaaaatagag

SEQ ID NO: 1468 - DNA, 20 bp, Glycine max
tgaaacaagaggtaaaaaga

SEQ ID NO: 1469 - DNA, 20 bp, Glycine max
taaacgtaaaatgaaacaag

SEQ ID NO: 1470 - DNA, 20 bp, Glycine max
atctaaaataagaagtggca

SEQ ID NO: 1471 - DNA, 20 bp, Glycine max
gtgaaatctaaaataagaag

SEQ ID NO: 1472 - DNA, 20 bp, Glycine max
gatttcacaatcaataaact

SEQ ID NO: 1473 - DNA, 20 bp, Glycine max
atcaataaactaggcacgcg

SEQ ID NO: 1474 - DNA, 20 bp, Glycine max
tttttcttttaataaataga

SEQ ID NO: 1475 - DNA, 20 bp, Glycine max
tatttaggttcaatttttta

SEQ ID NO: 1476 - DNA, 20 bp, Glycine max
aaattgttttaataatattt

SEQ ID NO: 1477 - DNA, 20 bp, Glycine max
attaagatcaaattgcaaat

SEQ ID NO: 1478 - DNA, 20 bp, Glycine max
aattaagatcaaattgcaaa

SEQ ID NO: 1479 - DNA, 20 bp, Glycine max
aatttgatcttaattactaa

SEQ ID NO: 1480 - DNA, 20 bp, Glycine max
cactttgctgcaagtttcta

SEQ ID NO: 1481 - DNA, 20 bp, Glycine max
gctgcaagtttctatggtaa

SEQ ID NO: 1482 - DNA, 20 bp, Glycine max
agtttctatggtaaaggccc

SEQ ID NO: 1483 - DNA, 20 bp, Glycine max
tatcgcaaaatttgaagcct

SEQ ID NO: 1484 - DNA, 20 bp, Glycine max
ttatcgcaaaatttgaagcc

SEQ ID NO: 1485 - DNA, 20 bp, Glycine max
aggcttcaaattttgcgata

SEQ ID NO: 1486 - DNA, 20 bp, Glycine max
caaccactcctttaaataat

SEQ ID NO: 1487 - DNA, 20 bp, Glycine max
aggtatgaccaattatttaa

SEQ ID NO: 1488 - DNA, 20 bp, Glycine max
tgaccaattatttaaaggag

SEQ ID NO: 1489 - DNA, 20 bp, Glycine max
caatcttgtttgttaagaat

SEQ ID NO: 1490 - DNA, 20 bp, Glycine max
aaaaaaaaaaaaaacttata

SEQ ID NO: 1491 - DNA, 5765 bp, Glycine max
ttaacataaattataaaactataaagtatgagaattgtgaaagatacatatagagagaaaaagaaagtaatgaagagtttcttattaatgtcaaacataaatagtcataaataagtacaacaaaataaattttactaatcaatattattagtgtattaattaaaaatgatttattatgtaaaacatatgtgagaattaaaaaaaaagttataaacagcacaattttacttattcaaataaaattatttcttcttctaaattttttaaaaatatcctaattaaggatactgattatgatttatttatccaccagaaattatggataaccacaatgaaatgctccattgatgacaaaatgaagttaagttgttgctttaatttttaacgtttgagaagatctcacacaaatataaacataaaaataattaaatagtataagaaatataaaaaacaataaatgcaaataaactctatttgtactaccccttcttccttacctgctgcgtttacatacccaactgatccaaatctgcaacaaaagcagcaaaggcatcgtcacgcaagaaactacaatttaattcagcaaaggcatacgtcaacaacttccccaccttcttttcctcgatctcccacgagaccctcaccttctccaccaccccaaaatggaaaagcaacaacctacacagcctcagcctcaccacgacttcattttccgttccaaactccccgacatttacatcccaacgcacctccctctccacacttaccttttccaaaacctctcacaattcaaagaccttccatgcctcatcaatgccgccaccggcgagactttcacctacgccgccgtcgaactcaccgcccgcaaagttgcctccggtttcaacaaactcggcatccaaaaaggcgacgtcatcctccttctcctccagaactgcccccaattcgtcttcgcattcctcggcgcctcctaccgcggtgccaccgtcaccgccgccaatcctttctacactccggcggaggtagcgaaacaagccacagcgtccaactccaaactcatcataacgcaagcatcttacgtggataaagtaaaggattttgcgagagaaaacgacgtcaaagtgatatgcgttgactcggcgccggatggttaccttcacttctcggtgttaacggaggccgacgagggagacattcccgccgttaaaatatctcaagatgacgtggttgcgctgccgtactcgtctggcacgacggggcttccgaagggagtgatgctaacgcacaagggactcgttacgagcgtggctcaacaggttgacggagagaaccctaatttgtactttcgcagcgacgatgtggtagtgtgtgttctgccacttttccacatttattcgctcaactctgttttgctgtgttcgcttcgagttggggctgccgttttgatcgttccgaagtttgagatagttgcgttgctggagttggtgcagaaacacaatgtgagcgtcgcgccgtttgtgccgccaatcgttttggccattgctaagagtcctgatgtggagcgatacgacgtgtcgtcgattcggatgatcatgtctggcgcggcacccatgggaaaggaacttgaggattctgtgagggctaagcttcccaacgccacacttggacaggtaattatgattcaaacggagaagacatgatgggtctatttagtaagttttccttgcaagtatttttggaaaaaaaaagtcatttttttcataagttaaaataagttttatattaattaatttatatatatttttttaaaaaattatatgaaaatttttaatctatgattttttttttcaatctgttaaaagtatttcttgaaaaaaaattattcataccgactcttgtcttgccttttgacttttgagtcagttctttcaagttttggtgcatactgcatactatagctaagcctgacacttggatagtacaaaaccatttaacaaaggatacattaattcccagtccaatggtttagttttgagtcagggccctatagctaagccaggattcaaaagtgcaaatgttaacgatttctacctgaaagaacgtatttattgtcgtcaaaaagaaggaaaaataaagtattttattgcacctaaaagtataaaagctgtttaatagtccacatctttttatatcattaagcaattaaatgtcttaagttgagtgtattaaatatattttaagtaatgctatcgtaacactttttaaagactctgttaagatttttaaatacattagtatataatacagtattttgatatttaaaaaaaagtatgaaatttttttatttctaattcaaaaatgctttcaataaaaattgttgtttttttatttttaactaatactaaaaacagtcattagcatttatttttactatagtctactacagtatgagagacactcctgcctctttaatactttaatataatgaataattttatttcttttgatatacttatattttaaaagtactacgtaattattagcatgtcattagggtatatattcataaaagagtatcaacaatagttgatataataatttatgtttgatctaagatttaaatcataattttatatatgaaataaattatattataagataaatatttatctttatatactcgttgtattcgttaaagattagtcaataatttagacgacaagtatttcttagcacggtaagtaaaaaaatcttaatgaaaaaaaaaatagcggtatgaatgaataatttccaagagaaacgcagcataattggatatgctccatccaggctccacaactattatttttctagttttaactaaaaatccaaaagagaaaagtgaataatgtcataattgtatgaacagcactactgcactagacatgaataaattcgttcggcgcatttttcgtaaagttcttatcgcattcatgaggagcagcattaggaaagaaacctcagcaggacaattacaaagaatgaaagaagcataagaaatgtaaacattgcgacgattgtatgatacatgctgcagggttatgggatgacggaggcaggaccagtgctatcaatgtgcttagcgtttgcgaaggagccaatgcaggtcaaatcaggtgcctgcgggaccgtcgtaagaaatgcggagatgaaaattattgatcctgatactggcgcttcgcttcataggaatcaagctggtgagatttgcattagaggcaaccagatcatgaaaggtaattaaactttttctctctttccataacccaagaaaataaatacttaaatcggtgtattggacaaattttatatgatttttttttttttgttttcttaacgcaattagctaattactacacataggtaccatgcgggtggttgcagtatttgattgtctaatttcttgctaatgttgtcaaactattgaatgtttttgtcacatgtttcccatgatctatcatcttattacctgttaatgttaaactattatttcttctatatttgattagtttacccacgagccacggaacactaaaaagtggtcttcatcgctggtaggtaggttagccatattgagttccttggaattattattttttactttatttggtatgatagaaagagtgggagagaaaggaaagacactcaatttatcatccagtcttcttttgatcagtgaaagcgggaaaggaagaataccaaaaaatatatatatgaaaaaacgggaaaggaaacattaaaaaaagagtgaaacacttaacttcagtcttctctataaaataggaagaaaaggagagaaaaaaaaaagtgaatttgaacataaacgccgccaaactttaaatcagtagctttcgtatatcttttttcaaatatttgctaagctctaaagaacacaataattaatattttaatattcatattcatatatatgtttcaaacatttgaataataagatgcaaatgattgacaaaaataaattattacaattagaagtattataaattgaaaaaaaaattgtcgtgaatttttctaaaaaaatgaaccaagaataaaaaaagaaaaaaaacatatttgttaatgaattaaattaattcttaactttaattttaggaattgatataatttaaactaaatcaaagttatacgcatatatataaatttgtggtgtatttaaccaaattttgttatatatatatatgtgtgtgtgtttctataacaagctagttaattcaaagagtatgtcaaatgcttaagtggtacttagttaagacatgtttggttaggttacctaaatgatcaagaggccacagaaagaactatagacaaaggaggatggttgcacacaggtgatattggatacatagatgataatgatgagctcttcatcgttgaccggttaaaggagttgattaaatataaaggatttcaagtggctccagctgagctcgaagccatgctagttgctcatcctaacatctctgatgctgccgttgtatcgtaagttatatagttagcatataaatttattttgatcctctcttgtttattttctcttcaaacatagattttaatgatcacgttgatttcagaatgaaggatgaagttgcaggagaggttccagttgcatttgttgtacgatcaaatggttcaatgatttctgaggatgaaataaagcaatacatctcaaagcaggtaattatttttgttggctttcagcattagttacaatgtttgtggcatcttgtattttaattatattgtgctacgaaaatttcaatatttttgtgacaggttgtattttacaaaagaattagtagagttttctttgtgggctcaattccaaaggcaccctctggaaagatctttcgaaaagacctcagggcctggcttgcaaccgatcttgctatttaggctttaatttaaatgttttattataaggtcacccaccttcggtgtaaatatgagggcccaacccaactaagtcaccatttttgtactaaatggtgccccgctaagcaggagagaaaagacatttcatactattaatgtgtttttttgaattgaaagacccaaaaatcctgcttttgttgtattattttgttcttttgtttgaaacccaaatgttcaaatgaagcatatatagaacttccatggaatatatctatgtaaattcgtaaaaagtagaagaagttattaaacgacgagaacaaagttcatccaagctgtttgagttaaaatattaaaaaacacaataatcaccgattagtgtaactttataattattatattattttataatttttaactgaataatatttttttaacattaatcgttggattgaaaattattttcatataaattagtatataaaatttcatattaatctaaaatcatttattttttcttttatataaattaaaatcaacgtaatataaatatttcaaaatataataaaatatggatcattattcttattattgtttaattttgataaaatttgacacaaataattttaataatacatagatatattctaatggttgtatcaataataatcacattttatattaaattataaaaataatgtaataattattaaagttattttggtgtatatcgatatatacatatatattgagagagagggtgggagacattagaaaggtctctcatttatctttgtagtaagatgggtgaacgagtgattaacttgtgtcttttgttg

SEQ ID NO: 1492 - DNA, 1644 bp, Glycine max
atggaaaagcaacaacctacacagcctcagcctcaccacgacttcattttccgttccaaactccccgacatttacatcccaacgcacctccctctccacacttaccttttccaaaacctctcacaattcaaagaccttccatgcctcatcaatgccgccaccggcgagactttcacctacgccgccgtcgaactcaccgcccgcaaagttgcctccggtttcaacaaactcggcatccaaaaaggcgacgtcatcctccttctcctccagaactgcccccaattcgtcttcgcattcctcggcgcctcctaccgcggtgccaccgtcaccgccgccaatcctttctacactccggcggaggtagcgaaacaagccacagcgtccaactccaaactcatcataacgcaagcatcttacgtggataaagtaaaggattttgcgagagaaaacgacgtcaaagtgatatgcgttgactcggcgccggatggttaccttcacttctcggtgttaacggaggccgacgagggagacattcccgccgttaaaatatctcaagatgacgtggttgcgctgccgtactcgtctggcacgacggggcttccgaagggagtgatgctaacgcacaagggactcgttacgagcgtggctcaacaggttgacggagagaaccctaatttgtactttcgcagcgacgatgtggtagtgtgtgttctgccacttttccacatttattcgctcaactctgttttgctgtgttcgcttcgagttggggctgccgttttgatcgttccgaagtttgagatagttgcgttgctggagttggtgcagaaacacaatgtgagcgtcgcgccgtttgtgccgccaatcgttttggccattgctaagagtcctgatgtggagcgatacgacgtgtcgtcgattcggatgatcatgtctggcgcggcacccatgggaaaggaacttgaggattctgtgagggctaagcttcccaacgccacacttggacagggttatgggatgacggaggcaggaccagtgctatcaatgtgcttagcgtttgcgaaggagccaatgcaggtcaaatcaggtgcctgcgggaccgtcgtaagaaatgcggagatgaaaattattgatcctgatactggcgcttcgcttcataggaatcaagctggtgagatttgcattagaggcaaccagatcatgaaaggttacctaaatgatcaagaggccacagaaagaactatagacaaaggaggatggttgcacacaggtgatattggatacatagatgataatgatgagctcttcatcgttgaccggttaaaggagttgattaaatataaaggatttcaagtggctccagctgagctcgaagccatgctagttgctcatcctaacatctctgatgctgccgttgtatcaatgaaggatgaagttgcaggagaggttccagttgcatttgttgtacgatcaaatggttcaatgatttctgaggatgaaataaagcaatacatctcaaagcaggttgtattttacaaaagaattagtagagttttctttgtgggctcaattccaaaggcaccctctggaaagatctttcgaaaagacctcagggcctggcttgcaaccgatcttgctatttag

SEQ ID NO: 1493 - protein, 547 aa, Glycine max
MEKQQPTQPQPHHDFIFRSKLPDIYIPTHLPLHTYLFQNLSQFKDLPCLINAATGETFTYAAVELTARKVASGFNKLGIQKGDVILLLLQNCPQFVFAFLGASYRGATVTAANPFYTPAEVAKQATASNSKLIITQASYVDKVKDFARENDVKVICVDSAPDGYLHFSVLTEADEGDIPAVKISQDDVVALPYSSGTTGLPKGVMLTHKGLVTSVAQQVDGENPNLYFRSDDVVVCVLPLFHIYSLNSVLLCSLRVGAAVLIVPKFEIVALLELVQKHNVSVAPFVPPIVLAIAKSPDVERYDVSSIRMIMSGAAPMGKELEDSVRAKLPNATLGQGYGMTEAGPVLSMCLAFAKEPMQVKSGACGTVVRNAEMKIIDPDTGASLHRNQAGEICIRGNQIMKGYLNDQEATERTIDKGGWLHTGDIGYIDDNDELFIVDRLKELIKYKGFQVAPAELEAMLVAHPNISDAAVVSMKDEVAGEVPVAFVVRSNGSMISEDEIKQYISKQVVFYKRISRVFFVGSIPKAPSGKIFRKDLRAWLATDLAI

SEQ ID NO: 1494 - DNA, 20 bp, Glycine max
actacaatttaattcagcaa

SEQ ID NO: 1495 - DNA, 20 bp, Glycine max
agatcgaggaaaagaaggtg

SEQ ID NO: 1496 - DNA, 20 bp, Glycine max
gagatcgaggaaaagaaggt

SEQ ID NO: 1497 - DNA, 20 bp, Glycine max
ggagatcgaggaaaagaagg

SEQ ID NO: 1498 - DNA, 20 bp, Glycine max
gtgggagatcgaggaaaaga

SEQ ID NO: 1499 - DNA, 20 bp, Glycine max
gagggtctcgtgggagatcg

SEQ ID NO: 1500 - DNA, 20 bp, Glycine max
ggagaaggtgagggtctcgt

SEQ ID NO: 1501 - DNA, 20 bp, Glycine max
tggagaaggtgagggtctcg

SEQ ID NO: 1502 - DNA, 20 bp, Glycine max
tggggtggtggagaaggtga

SEQ ID NO: 1503 - DNA, 20 bp, Glycine max
ttggggtggtggagaaggtg

SEQ ID NO: 1504 - DNA, 20 bp, Glycine max
ccattttggggtggtggaga

SEQ ID NO: 1505 - DNA, 20 bp, Glycine max
gcttttccattttggggtgg

SEQ ID NO: 1506 - DNA, 20 bp, Glycine max
gttgcttttccattttgggg

SEQ ID NO: 1507 - DNA, 20 bp, Glycine max
ccttctccaccaccccaaaa

SEQ ID NO: 1508 - DNA, 20 bp, Glycine max
gttgttgcttttccattttg

SEQ ID NO: 1509 - DNA, 20 bp, Glycine max
ggttgttgcttttccatttt

SEQ ID NO: 1510 - DNA, 20 bp, Glycine max
aggttgttgcttttccattt

SEQ ID NO: 1511 - DNA, 20 bp, Glycine max
tggtgaggctgaggctgtgt

SEQ ID NO: 1512 - DNA, 20 bp, Glycine max
atgaagtcgtggtgaggctg

SEQ ID NO: 1513 - DNA, 20 bp, Glycine max
cggaaaatgaagtcgtggtg

SEQ ID NO: 1514 - DNA, 20 bp, Glycine max
tggaacggaaaatgaagtcg

SEQ ID NO: 1515 - DNA, 20 bp, Glycine max
aaatgtcggggagtttggaa

SEQ ID NO: 1516 - DNA, 20 bp, Glycine max
gatgtaaatgtcggggagtt

SEQ ID NO: 1517 - DNA, 20 bp, Glycine max
gcgttgggatgtaaatgtcg

SEQ ID NO: 1518 - DNA, 20 bp, Glycine max
tgcgttgggatgtaaatgtc

SEQ ID NO: 1519 - DNA, 20 bp, Glycine max
gtgcgttgggatgtaaatgt

SEQ ID NO: 1520 - DNA, 20 bp, Glycine max
tgtggagagggaggtgcgtt

SEQ ID NO: 1521 - DNA, 20 bp, Glycine max
gtgtggagagggaggtgcgt

SEQ ID NO: 1522 - DNA, 20 bp, Glycine max
aaaggtaagtgtggagaggg

SEQ ID NO: 1523 - DNA, 20 bp, Glycine max
ggaaaaggtaagtgtggaga

SEQ ID NO: 1524 - DNA, 20 bp, Glycine max
tggaaaaggtaagtgtggag

SEQ ID NO: 1525 - DNA, 20 bp, Glycine max
ggttttggaaaaggtaagtg

SEQ ID NO: 1526 - DNA, 20 bp, Glycine max
attgtgagaggttttggaaa

SEQ ID NO: 1527 - DNA, 20 bp, Glycine max
ctttgaattgtgagaggttt

SEQ ID NO: 1528 - DNA, 20 bp, Glycine max
gaaggtctttgaattgtgag

SEQ ID NO: 1529 - DNA, 20 bp, Glycine max
cggcattgatgaggcatgga

SEQ ID NO: 1530 - DNA, 20 bp, Glycine max
gtggcggcattgatgaggca

SEQ ID NO: 1531 - DNA, 20 bp, Glycine max
cgccggtggcggcattgatg

SEQ ID NO: 1532 - DNA, 20 bp, Glycine max
tgcctcatcaatgccgccac

SEQ ID NO: 1533 - DNA, 20 bp, Glycine max
ggtgaaagtctcgccggtgg

SEQ ID NO: 1534 - DNA, 20 bp, Glycine max
gtaggtgaaagtctcgccgg

SEQ ID NO: 1535 - DNA, 20 bp, Glycine max
ggcgtaggtgaaagtctcgc

SEQ ID NO: 1536 - DNA, 20 bp, Glycine max
ggtgagttcgacggcggcgt

SEQ ID NO: 1537 - DNA, 20 bp, Glycine max
gcgggcggtgagttcgacgg

SEQ ID NO: 1538 - DNA, 20 bp, Glycine max
tttgcgggcggtgagttcga

SEQ ID NO: 1539 - DNA, 20 bp, Glycine max
accggaggcaactttgcggg

SEQ ID NO: 1540 - DNA, 20 bp, Glycine max
gaaaccggaggcaactttgc

SEQ ID NO: 1541 - DNA, 20 bp, Glycine max
tgaaaccggaggcaactttg

SEQ ID NO: 1542 - DNA, 20 bp, Glycine max
accgcccgcaaagttgcctc

SEQ ID NO: 1543 - DNA, 20 bp, Glycine max
gccgagtttgttgaaaccgg

SEQ ID NO: 1544 - DNA, 20 bp, Glycine max
gatgccgagtttgttgaaac

SEQ ID NO: 1545 - DNA, 20 bp, Glycine max
gcctccggtttcaacaaact

SEQ ID NO: 1546 - DNA, 20 bp, Glycine max
aacaaactcggcatccaaaa

SEQ ID NO: 1547 - DNA, 20 bp, Glycine max
ggaggatgacgtcgcctttt

SEQ ID NO: 1548 - DNA, 20 bp, Glycine max
ggcagttctggaggagaagg

SEQ ID NO: 1549 - DNA, 20 bp, Glycine max
gggggcagttctggaggaga

SEQ ID NO: 1550 - DNA, 20 bp, Glycine max
cgaattgggggcagttctgg

SEQ ID NO: 1551 - DNA, 20 bp, Glycine max
agacgaattgggggcagttc

SEQ ID NO: 1552 - DNA, 20 bp, Glycine max
ggaatgcgaagacgaattgg

SEQ ID NO: 1553 - DNA, 20 bp, Glycine max
aggaatgcgaagacgaattg

SEQ ID NO: 1554 - DNA, 20 bp, Glycine max
gaggaatgcgaagacgaatt

SEQ ID NO: 1555 - DNA, 20 bp, Glycine max
cgaggaatgcgaagacgaat

SEQ ID NO: 1556 - DNA, 20 bp, Glycine max
caattcgtcttcgcattcct

SEQ ID NO: 1557 - DNA, 20 bp, Glycine max
caccgcggtaggaggcgccg

SEQ ID NO: 1558 - DNA, 20 bp, Glycine max
gacggtggcaccgcggtagg

SEQ ID NO: 1559 - DNA, 20 bp, Glycine max
ttcctcggcgcctcctaccg

SEQ ID NO: 1560 - DNA, 20 bp, Glycine max
ggtgacggtggcaccgcggt

SEQ ID NO: 1561 - DNA, 20 bp, Glycine max
cggcggtgacggtggcaccg

SEQ ID NO: 1562 - DNA, 20 bp, Glycine max
aggattggcggcggtgacgg

SEQ ID NO: 1563 - DNA, 20 bp, Glycine max
gaaaggattggcggcggtga

SEQ ID NO: 1564 - DNA, 20 bp, Glycine max
agtgtagaaaggattggcgg

SEQ ID NO: 1565 - DNA, 20 bp, Glycine max
cggagtgtagaaaggattgg

SEQ ID NO: 1566 - DNA, 20 bp, Glycine max
cgccggagtgtagaaaggat

SEQ ID NO: 1567 - DNA, 20 bp, Glycine max
acctccgccggagtgtagaa

SEQ ID NO: 1568 - DNA, 20 bp, Glycine max
cgccaatcctttctacactc

SEQ ID NO: 1569 - DNA, 20 bp, Glycine max
caatcctttctacactccgg

SEQ ID NO: 1570 - DNA, 20 bp, Glycine max
tcctttctacactccggcgg

SEQ ID NO: 1571 - DNA, 20 bp, Glycine max
gcttgtttcgctacctccgc

SEQ ID NO: 1572 - DNA, 20 bp, Glycine max
gagtttggagttggacgctg

SEQ ID NO: 1573 - DNA, 20 bp, Glycine max
cgttatgatgagtttggagt

SEQ ID NO: 1574 - DNA, 20 bp, Glycine max
tgcttgcgttatgatgagtt

SEQ ID NO: 1575 - DNA, 20 bp, Glycine max
cataacgcaagcatcttacg

SEQ ID NO: 1576 - DNA, 20 bp, Glycine max
atcttacgtggataaagtaa

SEQ ID NO: 1577 - DNA, 20 bp, Glycine max
caaagtgatatgcgttgact

SEQ ID NO: 1578 - DNA, 20 bp, Glycine max
gatatgcgttgactcggcgc

SEQ ID NO: 1579 - DNA, 20 bp, Glycine max
tgcgttgactcggcgccgga

SEQ ID NO: 1580 - DNA, 20 bp, Glycine max
gagaagtgaaggtaaccatc

SEQ ID NO: 1581 - DNA, 20 bp, Glycine max
ccgttaacaccgagaagtga

SEQ ID NO: 1582 - DNA, 20 bp, Glycine max
ggatggttaccttcacttct

SEQ ID NO: 1583 - DNA, 20 bp, Glycine max
ccttcacttctcggtgttaa

SEQ ID NO: 1584 - DNA, 20 bp, Glycine max
tcacttctcggtgttaacgg

SEQ ID NO: 1585 - DNA, 20 bp, Glycine max
ggtgttaacggaggccgacg

SEQ ID NO: 1586 - DNA, 20 bp, Glycine max
gtgttaacggaggccgacga

SEQ ID NO: 1587 - DNA, 20 bp, Glycine max
ggcgggaatgtctccctcgt

SEQ ID NO: 1588 - DNA, 20 bp, Glycine max
tcttgagatattttaacggc

SEQ ID NO: 1589 - DNA, 20 bp, Glycine max
atcttgagatattttaacgg

SEQ ID NO: 1590 - DNA, 20 bp, Glycine max
gtcatcttgagatattttaa

SEQ ID NO: 1591 - DNA, 20 bp, Glycine max
taaaatatctcaagatgacg

SEQ ID NO: 1592 - DNA, 20 bp, Glycine max
cccgtcgtgccagacgagta

SEQ ID NO: 1593 - DNA, 20 bp, Glycine max
gttgcgctgccgtactcgtc

SEQ ID NO: 1594 - DNA, 20 bp, Glycine max
gccgtactcgtctggcacga

SEQ ID NO: 1595 - DNA, 20 bp, Glycine max
ccgtactcgtctggcacgac

SEQ ID NO: 1596 - DNA, 20 bp, Glycine max
cgtactcgtctggcacgacg

SEQ ID NO: 1597 - DNA, 20 bp, Glycine max
tggcacgacggggcttccga

SEQ ID NO: 1598 - DNA, 20 bp, Glycine max
ggcacgacggggcttccgaa

SEQ ID NO: 1599 - DNA, 20 bp, Glycine max
tgcgttagcatcactccctt

SEQ ID NO: 1600 - DNA, 20 bp, Glycine max
gggagtgatgctaacgcaca

SEQ ID NO: 1601 - DNA, 20 bp, Glycine max
ggagtgatgctaacgcacaa

SEQ ID NO: 1602 - DNA, 20 bp, Glycine max
caagggactcgttacgagcg

SEQ ID NO: 1603 - DNA, 20 bp, Glycine max
cgttacgagcgtggctcaac

SEQ ID NO: 1604 - DNA, 20 bp, Glycine max
agcgtggctcaacaggttga

SEQ ID NO: 1605 - DNA, 20 bp, Glycine max
cgctgcgaaagtacaaatta

SEQ ID NO: 1606 - DNA, 20 bp, Glycine max
tcgctgcgaaagtacaaatt

SEQ ID NO: 1607 - DNA, 20 bp, Glycine max
gtactttcgcagcgacgatg

SEQ ID NO: 1608 - DNA, 20 bp, Glycine max
agcgaataaatgtggaaaag

SEQ ID NO: 1609 - DNA, 20 bp, Glycine max
cagagttgagcgaataaatg

SEQ ID NO: 1610 - DNA, 20 bp, Glycine max
ttgctgtgttcgcttcgagt

SEQ ID NO: 1611 - DNA, 20 bp, Glycine max
tgctgtgttcgcttcgagtt

SEQ ID NO: 1612 - DNA, 20 bp, Glycine max
gctgtgttcgcttcgagttg

SEQ ID NO: 1613 - DNA, 20 bp, Glycine max
aaacttcggaacgatcaaaa

SEQ ID NO: 1614 - DNA, 20 bp, Glycine max
aacgcaactatctcaaactt

SEQ ID NO: 1615 - DNA, 20 bp, Glycine max
gtttgagatagttgcgttgc

SEQ ID NO: 1616 - DNA, 20 bp, Glycine max
gatagttgcgttgctggagt

SEQ ID NO: 1617 - DNA, 20 bp, Glycine max
aaaacgattggcggcacaaa

SEQ ID NO: 1618 - DNA, 20 bp, Glycine max
gcaatggccaaaacgattgg

SEQ ID NO: 1619 - DNA, 20 bp, Glycine max
ttagcaatggccaaaacgat

SEQ ID NO: 1620 - DNA, 20 bp, Glycine max
gtttgtgccgccaatcgttt

SEQ ID NO: 1621 - DNA, 20 bp, Glycine max
cacatcaggactcttagcaa

SEQ ID NO: 1622 - DNA, 20 bp, Glycine max
cattgctaagagtcctgatg

SEQ ID NO: 1623 - DNA, 20 bp, Glycine max
acgtcgtatcgctccacatc

SEQ ID NO: 1624 - DNA, 20 bp, Glycine max
gatacgacgtgtcgtcgatt

SEQ ID NO: 1625 - DNA, 20 bp, Glycine max
tcgattcggatgatcatgtc

SEQ ID NO: 1626 - DNA, 20 bp, Glycine max
tcggatgatcatgtctggcg

SEQ ID NO: 1627 - DNA, 20 bp, Glycine max
catgtctggcgcggcaccca

SEQ ID NO: 1628 - DNA, 20 bp, Glycine max
atgtctggcgcggcacccat

SEQ ID NO: 1629 - DNA, 20 bp, Glycine max
tcctcaagttcctttcccat

SEQ ID NO: 1630 - DNA, 20 bp, Glycine max
tggcgcggcacccatgggaa

SEQ ID NO: 1631 - DNA, 20 bp, Glycine max
atcctcaagttcctttccca

SEQ ID NO: 1632 - DNA, 20 bp, Glycine max
acccatgggaaaggaacttg

SEQ ID NO: 1633 - DNA, 20 bp, Glycine max
aggaacttgaggattctgtg

SEQ ID NO: 1634 - DNA, 20 bp, Glycine max
ggaacttgaggattctgtga

SEQ ID NO: 1635 - DNA, 20 bp, Glycine max
acctgtccaagtgtggcgtt

SEQ ID NO: 1636 - DNA, 20 bp, Glycine max
tacctgtccaagtgtggcgt

SEQ ID NO: 1637 - DNA, 20 bp, Glycine max
aagcttcccaacgccacact

SEQ ID NO: 1638 - DNA, 20 bp, Glycine max
cataattacctgtccaagtg

SEQ ID NO: 1639 - DNA, 20 bp, Glycine max
tcccaacgccacacttggac

SEQ ID NO: 1640 - DNA, 20 bp, Glycine max
acaggtaattatgattcaaa

SEQ ID NO: 1641 - DNA, 20 bp, Glycine max
ttcaaacggagaagacatga

SEQ ID NO: 1642 - DNA, 20 bp, Glycine max
tcaaacggagaagacatgat

SEQ ID NO: 1643 - DNA, 20 bp, Glycine max
tttttccaaaaatacttgca

SEQ ID NO: 1644 - DNA, 20 bp, Glycine max
gttttccttgcaagtatttt

SEQ ID NO: 1645 - DNA, 20 bp, Glycine max
tcaaaaggcaagacaagagt

SEQ ID NO: 1646 - DNA, 20 bp, Glycine max
gaactgactcaaaagtcaaa

SEQ ID NO: 1647 - DNA, 20 bp, Glycine max
gagtcagttctttcaagttt

SEQ ID NO: 1648 - DNA, 20 bp, Glycine max
ctatagctaagcctgacact

SEQ ID NO: 1649 - DNA, 20 bp, Glycine max
ttttgtactatccaagtgtc

SEQ ID NO: 1650 - DNA, 20 bp, Glycine max
ttaatgtatcctttgttaaa

SEQ ID NO: 1651 - DNA, 20 bp, Glycine max
agtacaaaaccatttaacaa

SEQ ID NO: 1652 - DNA, 20 bp, Glycine max
caaaactaaaccattggact

SEQ ID NO: 1653 - DNA, 20 bp, Glycine max
tacattaattcccagtccaa

SEQ ID NO: 1654 - DNA, 20 bp, Glycine max
tcaaaactaaaccattggac

SEQ ID NO: 1655 - DNA, 20 bp, Glycine max
ctgactcaaaactaaaccat

SEQ ID NO: 1656 - DNA, 20 bp, Glycine max
caatggtttagttttgagtc

SEQ ID NO: 1657 - DNA, 20 bp, Glycine max
aatggtttagttttgagtca

SEQ ID NO: 1658 - DNA, 20 bp, Glycine max
tgaatcctggcttagctata

SEQ ID NO: 1659 - DNA, 20 bp, Glycine max
ttgaatcctggcttagctat

SEQ ID NO: 1660 - DNA, 20 bp, Glycine max
cagggccctatagctaagcc

SEQ ID NO: 1661 - DNA, 20 bp, Glycine max
acatttgcacttttgaatcc

SEQ ID NO: 1662 - DNA, 20 bp, Glycine max
gacaataaatacgttctttc

SEQ ID NO: 1663 - DNA, 20 bp, Glycine max
atttattgtcgtcaaaaaga

SEQ ID NO: 1664 - DNA, 20 bp, Glycine max
taaacagcttttatactttt

SEQ ID NO: 1665 - DNA, 20 bp, Glycine max
cttaatgatataaaaagatg

SEQ ID NO: 1666 - DNA, 20 bp, Glycine max
tattaaagtattaaagaggc

SEQ ID NO: 1667 - DNA, 20 bp, Glycine max
attatattaaagtattaaag

SEQ ID NO: 1668 - DNA, 20 bp, Glycine max
gtaattattagcatgtcatt

SEQ ID NO: 1669 - DNA, 20 bp, Glycine max
taattattagcatgtcatta

SEQ ID NO: 1670 - DNA, 20 bp, Glycine max
acgacaagtatttcttagca

SEQ ID NO: 1671 - DNA, 20 bp, Glycine max
cttaatgaaaaaaaaaatag

SEQ ID NO: 1672 - DNA, 20 bp, Glycine max
caattatgctgcgtttctct

SEQ ID NO: 1673 - DNA, 20 bp, Glycine max
caagagaaacgcagcataat

SEQ ID NO: 1674 - DNA, 20 bp, Glycine max
taattggatatgctccatcc

SEQ ID NO: 1675 - DNA, 20 bp, Glycine max
taatagttgtggagcctgga

SEQ ID NO: 1676 - DNA, 20 bp, Glycine max
aaaataatagttgtggagcc

SEQ ID NO: 1677 - DNA, 20 bp, Glycine max
aactagaaaaataatagttg

SEQ ID NO: 1678 - DNA, 20 bp, Glycine max
cattattcacttttctcttt

SEQ ID NO: 1679 - DNA, 20 bp, Glycine max
tagacatgaataaattcgtt

SEQ ID NO: 1680 - DNA, 20 bp, Glycine max
aagttcttatcgcattcatg

SEQ ID NO: 1681 - DNA, 20 bp, Glycine max
cattcatgaggagcagcatt

SEQ ID NO: 1682 - DNA, 20 bp, Glycine max
attaggaaagaaacctcagc

SEQ ID NO: 1683 - DNA, 20 bp, Glycine max
tctttgtaattgtcctgctg

SEQ ID NO: 1684 - DNA, 20 bp, Glycine max
gattgtatgatacatgctgc

SEQ ID NO: 1685 - DNA, 20 bp, Glycine max
attgtatgatacatgctgca

SEQ ID NO: 1686 - DNA, 20 bp, Glycine max
tgatacatgctgcagggtta

SEQ ID NO: 1687 - DNA, 20 bp, Glycine max
gatacatgctgcagggttat

SEQ ID NO: 1688 - DNA, 20 bp, Glycine max
gctgcagggttatgggatga

SEQ ID NO: 1689 - DNA, 20 bp, Glycine max
gcagggttatgggatgacgg

SEQ ID NO: 1690 - DNA, 20 bp, Glycine max
ggttatgggatgacggaggc

SEQ ID NO: 1691 - DNA, 20 bp, Glycine max
gctaagcacattgatagcac

SEQ ID NO: 1692 - DNA, 20 bp, Glycine max
aatgtgcttagcgtttgcga

SEQ ID NO: 1693 - DNA, 20 bp, Glycine max
gtttgcgaaggagccaatgc

SEQ ID NO: 1694 - DNA, 20 bp, Glycine max
gcacctgatttgacctgcat

SEQ ID NO: 1695 - DNA, 20 bp, Glycine max
gagccaatgcaggtcaaatc

SEQ ID NO: 1696 - DNA, 20 bp, Glycine max
caggtcaaatcaggtgcctg

SEQ ID NO: 1697 - DNA, 20 bp, Glycine max
aggtcaaatcaggtgcctgc

SEQ ID NO: 1698 - DNA, 20 bp, Glycine max
atttcttacgacggtcccgc

SEQ ID NO: 1699 - DNA, 20 bp, Glycine max
catctccgcatttcttacga

SEQ ID NO: 1700 - DNA, 20 bp, Glycine max
cgggaccgtcgtaagaaatg

SEQ ID NO: 1701 - DNA, 20 bp, Glycine max
aaaattattgatcctgatac

SEQ ID NO: 1702 - DNA, 20 bp, Glycine max
tgaagcgaagcgccagtatc

SEQ ID NO: 1703 - DNA, 20 bp, Glycine max
atactggcgcttcgcttcat

SEQ ID NO: 1704 - DNA, 20 bp, Glycine max
tcgcttcataggaatcaagc

SEQ ID NO: 1705 - DNA, 20 bp, Glycine max
gctggtgagatttgcattag

SEQ ID NO: 1706 - DNA, 20 bp, Glycine max
tttaattacctttcatgatc

SEQ ID NO: 1707 - DNA, 20 bp, Glycine max
agaggcaaccagatcatgaa

SEQ ID NO: 1708 - DNA, 20 bp, Glycine max
gtatttattttcttgggtta

SEQ ID NO: 1709 - DNA, 20 bp, Glycine max
atttaagtatttattttctt

SEQ ID NO: 1710 - DNA, 20 bp, Glycine max
gatttaagtatttattttct

SEQ ID NO: 1711 - DNA, 20 bp, Glycine max
aagaaaataaatacttaaat

SEQ ID NO: 1712 - DNA, 20 bp, Glycine max
aaatacttaaatcggtgtat

SEQ ID NO: 1713 - DNA, 20 bp, Glycine max
attagctaattactacacat

SEQ ID NO: 1714 - DNA, 20 bp, Glycine max
tactacacataggtaccatg

SEQ ID NO: 1715 - DNA, 20 bp, Glycine max
actacacataggtaccatgc

SEQ ID NO: 1716 - DNA, 20 bp, Glycine max
acacataggtaccatgcggg

SEQ ID NO: 1717 - DNA, 20 bp, Glycine max
aaatactgcaaccacccgca

SEQ ID NO: 1718 - DNA, 20 bp, Glycine max
gtaataagatgatagatcat

SEQ ID NO: 1719 - DNA, 20 bp, Glycine max
ggtaataagatgatagatca

SEQ ID NO: 1720 - DNA, 20 bp, Glycine max
aataatagtttaacattaac

SEQ ID NO: 1721 - DNA, 20 bp, Glycine max
tttagtgttccgtggctcgt

SEQ ID NO: 1722 - DNA, 20 bp, Glycine max
ttttagtgttccgtggctcg

SEQ ID NO: 1723 - DNA, 20 bp, Glycine max
attagtttacccacgagcca

SEQ ID NO: 1724 - DNA, 20 bp, Glycine max
gaccactttttagtgttccg

SEQ ID NO: 1725 - DNA, 20 bp, Glycine max
agccacggaacactaaaaag

SEQ ID NO: 1726 - DNA, 20 bp, Glycine max
taaaaagtggtcttcatcgc

SEQ ID NO: 1727 - DNA, 20 bp, Glycine max
aagtggtcttcatcgctggt

SEQ ID NO: 1728 - DNA, 20 bp, Glycine max
ggtcttcatcgctggtaggt

SEQ ID NO: 1729 - DNA, 20 bp, Glycine max
taattccaaggaactcaata

SEQ ID NO: 1730 - DNA, 20 bp, Glycine max
gttagccatattgagttcct

SEQ ID NO: 1731 - DNA, 20 bp, Glycine max
agtaaaaaataataattcca

SEQ ID NO: 1732 - DNA, 20 bp, Glycine max
ttattattttttactttatt

SEQ ID NO: 1733 - DNA, 20 bp, Glycine max
atttggtatgatagaaagag

SEQ ID NO: 1734 - DNA, 20 bp, Glycine max
tttggtatgatagaaagagt

SEQ ID NO: 1735 - DNA, 20 bp, Glycine max
atagaaagagtgggagagaa

SEQ ID NO: 1736 - DNA, 20 bp, Glycine max
ttcactgatcaaaagaagac

SEQ ID NO: 1737 - DNA, 20 bp, Glycine max
cttcttttgatcagtgaaag

SEQ ID NO: 1738 - DNA, 20 bp, Glycine max
ttcttttgatcagtgaaagc

SEQ ID NO: 1739 - DNA, 20 bp, Glycine max
ttgatcagtgaaagcgggaa

SEQ ID NO: 1740 - DNA, 20 bp, Glycine max
tttttcatatatatattttt

SEQ ID NO: 1741 - DNA, 20 bp, Glycine max
aaaatatatatatgaaaaaa

SEQ ID NO: 1742 - DNA, 20 bp, Glycine max
aaatatatatatgaaaaaac

SEQ ID NO: 1743 - DNA, 20 bp, Glycine max
tatatatgaaaaaacgggaa

SEQ ID NO: 1744 - DNA, 20 bp, Glycine max
ttcagtcttctctataaaat

SEQ ID NO: 1745 - DNA, 20 bp, Glycine max
ctctataaaataggaagaaa

SEQ ID NO: 1746 - DNA, 20 bp, Glycine max
gctactgatttaaagtttgg

SEQ ID NO: 1747 - DNA, 20 bp, Glycine max
aaagctactgatttaaagtt

SEQ ID NO: 1748 - DNA, 20 bp, Glycine max
taattcttaactttaatttt

SEQ ID NO: 1749 - DNA, 20 bp, Glycine max
tacgcatatatataaatttg

SEQ ID NO: 1750 - DNA, 20 bp, Glycine max
tatatatatataacaaaatt

SEQ ID NO: 1751 - DNA, 20 bp, Glycine max
gagtatgtcaaatgcttaag

SEQ ID NO: 1752 - DNA, 20 bp, Glycine max
gtacttagttaagacatgtt

SEQ ID NO: 1753 - DNA, 20 bp, Glycine max
tagttaagacatgtttggtt

SEQ ID NO: 1754 - DNA, 20 bp, Glycine max
ctgtggcctcttgatcattt

SEQ ID NO: 1755 - DNA, 20 bp, Glycine max
aggttacctaaatgatcaag

SEQ ID NO: 1756 - DNA, 20 bp, Glycine max
tttgtctatagttctttctg

SEQ ID NO: 1757 - DNA, 20 bp, Glycine max
acagaaagaactatagacaa

SEQ ID NO: 1758 - DNA, 20 bp, Glycine max
gaaagaactatagacaaagg

SEQ ID NO: 1759 - DNA, 20 bp, Glycine max
gaactatagacaaaggagga

SEQ ID NO: 1760 - DNA, 20 bp, Glycine max
aaaggaggatggttgcacac

SEQ ID NO: 1761 - DNA, 20 bp, Glycine max
tggttgcacacaggtgatat

SEQ ID NO: 1762 - DNA, 20 bp, Glycine max
atgagctcttcatcgttgac

SEQ ID NO: 1763 - DNA, 20 bp, Glycine max
cttcatcgttgaccggttaa

SEQ ID NO: 1764 - DNA, 20 bp, Glycine max
atttaatcaactcctttaac

SEQ ID NO: 1765 - DNA, 20 bp, Glycine max
aaggagttgattaaatataa

SEQ ID NO: 1766 - DNA, 20 bp, Glycine max
taaatataaaggatttcaag

SEQ ID NO: 1767 - DNA, 20 bp, Glycine max
agcatggcttcgagctcagc

SEQ ID NO: 1768 - DNA, 20 bp, Glycine max
gttaggatgagcaactagca

SEQ ID NO: 1769 - DNA, 20 bp, Glycine max
acggcagcatcagagatgtt

SEQ ID NO: 1770 - DNA, 20 bp, Glycine max
ctatataacttacgatacaa

SEQ ID NO: 1771 - DNA, 20 bp, Glycine max
gaagagaaaataaacaagag

SEQ ID NO: 1772 - DNA, 20 bp, Glycine max
tcacgttgatttcagaatga

SEQ ID NO: 1773 - DNA, 20 bp, Glycine max
agaatgaaggatgaagttgc

SEQ ID NO: 1774 - DNA, 20 bp, Glycine max
gaaggatgaagttgcaggag

SEQ ID NO: 1775 - DNA, 20 bp, Glycine max
gatcgtacaacaaatgcaac

SEQ ID NO: 1776 - DNA, 20 bp, Glycine max
gcatttgttgtacgatcaaa

SEQ ID NO: 1777 - DNA, 20 bp, Glycine max
aaatggttcaatgatttctg

SEQ ID NO: 1778 - DNA, 20 bp, Glycine max
aaagcaatacatctcaaagc

SEQ ID NO: 1779 - DNA, 20 bp, Glycine max
aagcaggtaattatttttgt

SEQ ID NO: 1780 - DNA, 20 bp, Glycine max
agcattagttacaatgtttg

SEQ ID NO: 1781 - DNA, 20 bp, Glycine max
aatttcaatatttttgtgac

SEQ ID NO: 1782 - DNA, 20 bp, Glycine max
aattagtagagttttctttg

SEQ ID NO: 1783 - DNA, 20 bp, Glycine max
attagtagagttttctttgt

SEQ ID NO: 1784 - DNA, 20 bp, Glycine max
ctttgtgggctcaattccaa

SEQ ID NO: 1785 - DNA, 20 bp, Glycine max
atctttccagagggtgcctt

SEQ ID NO: 1786 - DNA, 20 bp, Glycine max
tcaattccaaaggcaccctc

SEQ ID NO: 1787 - DNA, 20 bp, Glycine max
tttcgaaagatctttccaga

SEQ ID NO: 1788 - DNA, 20 bp, Glycine max
ttttcgaaagatctttccag

SEQ ID NO: 1789 - DNA, 20 bp, Glycine max
agatctttcgaaaagacctc

SEQ ID NO: 1790 - DNA, 20 bp, Glycine max
gatctttcgaaaagacctca

SEQ ID NO: 1791 - DNA, 20 bp, Glycine max
cggttgcaagccaggccctg

SEQ ID NO: 1792 - DNA, 20 bp, Glycine max
ttcgaaaagacctcagggcc

SEQ ID NO: 1793 - DNA, 20 bp, Glycine max
agcaagatcggttgcaagcc

SEQ ID NO: 1794 - DNA, 20 bp, Glycine max
taaagcctaaatagcaagat

SEQ ID NO: 1795 - DNA, 20 bp, Glycine max
tgcaaccgatcttgctattt

SEQ ID NO: 1796 - DNA, 20 bp, Glycine max
aatttaaatgttttattata

SEQ ID NO: 1797 - DNA, 20 bp, Glycine max
attataaggtcacccacctt

SEQ ID NO: 1798 - DNA, 4359 bp, Glycine max
attcattagcaaatgtattattttttttaaaattacccatgaagaaatttattatcttcctctttttacttaactactttttacctacctaattaacgtgtgctaacttttcttttcatttcttataaaagagataatatatttagtttttaaattcacaaaattcaaacgtatcgcactattgcagattaagttagtttttttcatagtttaataatcaatttatatgtcatcatctcacatttttaaaaaccaaaataaatatttacccaccaacaaatcaaagtttctttttatgatgatttagtgccattgtcatttagtgcaaagagaattagatctctatgtaataatgtccatcccaatggatgaaatcatggattacttcatctcaatcaaaacctaactatccaaccaaagctcccacatggatttatttgtcttcatatccactgtcccatgtcttttataaatatatatatatatatatatatatatatatgcaagtgggactcataaattacaatcaaccaaacacaacacttcactctcaagcttcaagcatgactcctttttacttcctcctatttgccttcatccttttcctctccataaacttcttgatccaaacaagaaggttcaaaaaccttcctccgggaccattttctttccctataatcggaaacctccaccaactcaagcaacccctccaccgcacgttccatgccttatcacaaaaatatggccctattttctccctctggttcggctcccgttttgtcgtcgtcgtttcgtcgccgctcgcggtgcaagaatgcttcaccaagaacgacatcgtcttggccaaccgccctcacttcctcaccggcaagtatatagggtacaacaacaccaccgtcgccgtttccccctacggcgaccactggcgcaacctccgccgcatcatggcgctcgaggttctctccacccaccggataaactccttcttggaaaatcggagggacgagatcatgaggctcgtgcaaaagcttgctcgggactcgcgcaatggcttcaccaaagtagaacttaaatccaggtaacagtagtttataaggaaaaaaaaaactatttataataatgttatttattaaaaaaatcacacatgataatttagtatgttattgaaaaatatataaattgtgatttataattaaataataatataaaactaatttatcgtatgttgatacgtaatattaaactcatattttatataatatcatttttattaatttcttttaccataaataaacattactaagtatactttggaacacaaattaaaaattaagagaaggtttagtaatatactttctaactcattctttttaacacactctttcattagttaaaatttattaaaaattaaaaaataagaaaaaagtcattaaataagatataagattcaaaaaatctgtaatttcttttaaattttttaataaattttaactaataataaaaattatgttcaaaagactgtactactcgagagtgtattattaatattttttaacaattaaaagtaaatccttttcattgaaaaacatgataatacactcctgctaattttaaatgtaagtatcaaataaaatggttttatatgttgatttgttaacccttgttcctaatgcacgggttattaataaaaccttttattatactggatttcattattctttattttttttgctctttttcttaattgtaataagaaaaagaattattgaattttatattttcatttaatcaaaaattattatttacaataaatttattaatttttataaaattattttaaaaaataatattaataataatttataattaaatgatagtaaaaaactgttttatttcattattgttaaattcaaattctataatttattgtattagtaattctataaaacctctgaatccaggttttcggagatgacatttaacactataatgaggatggtgtcagggaagaggtactatggtgaagactgtgatgtgagtgatgtacaggaagcaaggcaatttagagagatcattaaagagttggtgacgttaggaggggctaataaccctggggacttcttggctttgcttaggtggtttgattttgatggtttggagaagagactaaagaggattagtaagagaaccgatgcgtttttacaaggactcattgatcagcatcgtaatggaaagcatcgtgccaatactatgatagatcatcttcttgctcaacagcaatcacaacctgaatattacaccgatcaaatcatcaaaggacttgcactggtaattaattaattattactttgtatgcataatcttcgtttttacaatatttagtgcgtagtacgtgtgtttggaaattggaattatatttttaaataatacttatttttaaaaaaaaatgctgaaattattgataaatatgaaatattattttttagaaatgaactaaagtaaatacgcactgtattaataaatatattgtcgggattatttatatttgcactcaatcgtacgtcttttagcttccatatactgagctatatagctgcagccacatattcaagattaggataagtttatgaatgaagtgcataaaacaaaatagtacaggaaaagaagataagaatggcagcatagtgtagatgcatggaacattaaaaatggcagttgtgcctgtggccccaagagacccaagtgttgacttgtgagcctgcactggtcctgagaccaatgggagtgttggaaacgaaaacttggaaagtaaacaagtaatagaaaattaatgaatagtgcttgattgtcgtgtggaatatataggctcctcttttttttttcttcttcttctttaggttgtcattaaagaccttatttgttatattgatatttatttttggacttctttacaggtaatgctacttgcaggaacagatacatcagcagtaactttagaatgggcaatgtctaatttattaaaccatccagaaatattaaagaaggcaaaaaatgaattagacactcatataggacaagatcgtctagtagatgagcctgacattccaaaactcccttaccttcaaagcattgtttatgagacacttcgtttgcatcctgctgctccaatgttggtaccccatttgtcttcagaagattgcaccataggagaatataatatcccacaaaacacaattttgttggtgaatgcttgggccattcatagagatcccaagttgtggagtgacccaacacactttaagcctgagaggtttgagaatgaaagtgaagcaaacaagttacttccatttgggttagggaggagggcttgccctggagctaacttggctcaacgcacactgagcttaactctggccttattaatccaatgttttgagtggaaaaggactactaaaaaagaaattgatatgactgaaggaaagggacttactgtgtcaaaaaaatatcccttagaagctatgtgccaagtgtgccaatcactgacagttaaggatatttataacttctagtgctgttaaaagcataaacatcttataatgtttttgaagaacttatatatgtaaaataaaatttatagtagtgctttatttattcaatgttttgagtggaaacgaactagtaaggaagaaattgatatgactgaaggaaaagggatcactgtgccaaggaaatttcctttagaagctatgtgccaagtgtgtcaatcaccaacaatttaaggatattttgtagctagtgttgttaaagcacacacatgttgtagtgttcgaagaagatataaaaaggtataaataaaacaaaattaataatacttgtgttaaaataaaacataggatcaagcttattcttcaaaagtacttacacttttaattttttttcctgcattttttgcttttaagttatctataaattttcttattagttatactgaaaagagaagaaaggaagagaattgtgtgaaaatatagtgtgcatgtgtgttcggttgagaagagttttgtggaattttgagttttaatatgggccgggtctcatacctcttattttttacctaccaaatcacttttattaattcaaatatttccaatatatttcactccattttattctttttttcccctcacaaccaaactcaccataaatgtgacttaacattggctttgtgtctgcttcgtggcagatgctaaaacaatcaaagttaatcaagtagcattaaatttttgtgaccgacactaatctaaataaaaggatgacactatttgtgttgaccaataaagggtgacaatcaatagctacaac

SEQ ID NO: 1799 - DNA, 1497 bp, Glycine max
atgactcctttttacttcctcctatttgccttcatccttttcctctccataaacttcttgatccaaacaagaaggttcaaaaaccttcctccgggaccattttctttccctataatcggaaacctccaccaactcaagcaacccctccaccgcacgttccatgccttatcacaaaaatatggccctattttctccctctggttcggctcccgttttgtcgtcgtcgtttcgtcgccgctcgcggtgcaagaatgcttcaccaagaacgacatcgtcttggccaaccgccctcacttcctcaccggcaagtatatagggtacaacaacaccaccgtcgccgtttccccctacggcgaccactggcgcaacctccgccgcatcatggcgctcgaggttctctccacccaccggataaactccttcttggaaaatcggagggacgagatcatgaggctcgtgcaaaagcttgctcgggactcgcgcaatggcttcaccaaagtagaacttaaatccaggttttcggagatgacatttaacactataatgaggatggtgtcagggaagaggtactatggtgaagactgtgatgtgagtgatgtacaggaagcaaggcaatttagagagatcattaaagagttggtgacgttaggaggggctaataaccctggggacttcttggctttgcttaggtggtttgattttgatggtttggagaagagactaaagaggattagtaagagaaccgatgcgtttttacaaggactcattgatcagcatcgtaatggaaagcatcgtgccaatactatgatagatcatcttcttgctcaacagcaatcacaacctgaatattacaccgatcaaatcatcaaaggacttgcactggtaatgctacttgcaggaacagatacatcagcagtaactttagaatgggcaatgtctaatttattaaaccatccagaaatattaaagaaggcaaaaaatgaattagacactcatataggacaagatcgtctagtagatgagcctgacattccaaaactcccttaccttcaaagcattgtttatgagacacttcgtttgcatcctgctgctccaatgttggtaccccatttgtcttcagaagattgcaccataggagaatataatatcccacaaaacacaattttgttggtgaatgcttgggccattcatagagatcccaagttgtggagtgacccaacacactttaagcctgagaggtttgagaatgaaagtgaagcaaacaagttacttccatttgggttagggaggagggcttgccctggagctaacttggctcaacgcacactgagcttaactctggccttattaatccaatgttttgagtggaaaaggactactaaaaaagaaattgatatgactgaaggaaagggacttactgtgtcaaaaaaatatcccttagaagctatgtgccaagtgtgccaatcactgacagttaaggatatttataacttctag

SEQ ID NO: 1800 - protein, 498 aa, Glycine max
MTPFYFLLFAFILFLSINFLIQTRRFKNLPPGPFSFPIIGNLHQLKQPLHRTFHALSQKYGPIFSLWFGSRFVVVVSSPLAVQECFTKNDIVLANRPHFLTGKYIGYNNTTVAVSPYGDHWRNLRRIMALEVLSTHRINSFLENRRDEIMRLVQKLARDSRNGFTKVELKSRFSEMTFNTIMRMVSGKRYYGEDCDVSDVQEARQFREIIKELVTLGGANNPGDFLALLRWFDFDGLEKRLKRISKRTDAFLQGLIDQHRNGKHRANTMIDHLLAQQQSQPEYYTDQIIKGLALVMLLAGTDTSAVTLEWAMSNLLNHPEILKKAKNELDTHIGQDRLVDEPDIPKLPYLQSIVYETLRLHPAAPMLVPHLSSEDCTIGEYNIPQNTILLVNAWAIHRDPKLWSDPTHFKPERFENESEANKLLPFGLGRRACPGANLAQRTLSLTLALLIQCFEWKRTTKKEIDMTEGKGLTVSKKYPLEAMCQVCQSLTVKDIYNF

SEQ ID NO: 1801 - DNA, 20 bp, Glycine max
aagataataaatttcttcat

SEQ ID NO: 1802 - DNA, 20 bp, Glycine max
gaagataataaatttcttca

SEQ ID NO: 1803 - DNA, 20 bp, Glycine max
aaaagtagttaagtaaaaag

SEQ ID NO: 1804 - DNA, 20 bp, Glycine max
ttagcacacgttaattaggt

SEQ ID NO: 1805 - DNA, 20 bp, Glycine max
aaagttagcacacgttaatt

SEQ ID NO: 1806 - DNA, 20 bp, Glycine max
tggtgggtaaatatttattt

SEQ ID NO: 1807 - DNA, 20 bp, Glycine max
agaaactttgatttgttggt

SEQ ID NO: 1808 - DNA, 20 bp, Glycine max
aagaaactttgatttgttgg

SEQ ID NO: 1809 - DNA, 20 bp, Glycine max
aaaaagaaactttgatttgt

SEQ ID NO: 1810 - DNA, 20 bp, Glycine max
ctctttgcactaaatgacaa

SEQ ID NO: 1811 - DNA, 20 bp, Glycine max
tgtaataatgtccatcccaa

SEQ ID NO: 1812 - DNA, 20 bp, Glycine max
catgatttcatccattggga

SEQ ID NO: 1813 - DNA, 20 bp, Glycine max
aatccatgatttcatccatt

SEQ ID NO: 1814 - DNA, 20 bp, Glycine max
taatccatgatttcatccat

SEQ ID NO: 1815 - DNA, 20 bp, Glycine max
catcccaatggatgaaatca

SEQ ID NO: 1816 - DNA, 20 bp, Glycine max
ggagctttggttggatagtt

SEQ ID NO: 1817 - DNA, 20 bp, Glycine max
atccatgtgggagctttggt

SEQ ID NO: 1818 - DNA, 20 bp, Glycine max
ataaatccatgtgggagctt

SEQ ID NO: 1819 - DNA, 20 bp, Glycine max
atccaaccaaagctcccaca

SEQ ID NO: 1820 - DNA, 20 bp, Glycine max
gaagacaaataaatccatgt

SEQ ID NO: 1821 - DNA, 20 bp, Glycine max
tgaagacaaataaatccatg

SEQ ID NO: 1822 - DNA, 20 bp, Glycine max
ttataaaagacatgggacag

SEQ ID NO: 1823 - DNA, 20 bp, Glycine max
tatatatttataaaagacat

SEQ ID NO: 1824 - DNA, 20 bp, Glycine max
atatatatttataaaagaca

SEQ ID NO: 1825 - DNA, 20 bp, Glycine max
tatatatatatatatgcaag

SEQ ID NO: 1826 - DNA, 20 bp, Glycine max
atatatatatatatgcaagt

SEQ ID NO: 1827 - DNA, 20 bp, Glycine max
tgagagtgaagtgttgtgtt

SEQ ID NO: 1828 - DNA, 20 bp, Glycine max
gcaaataggaggaagtaaaa

SEQ ID NO: 1829 - DNA, 20 bp, Glycine max
aaaggatgaaggcaaatagg

SEQ ID NO: 1830 - DNA, 20 bp, Glycine max
ggaaaaggatgaaggcaaat

SEQ ID NO: 1831 - DNA, 20 bp, Glycine max
tatggagaggaaaaggatga

SEQ ID NO: 1832 - DNA, 20 bp, Glycine max
agaagtttatggagaggaaa

SEQ ID NO: 1833 - DNA, 20 bp, Glycine max
ggatcaagaagtttatggag

SEQ ID NO: 1834 - DNA, 20 bp, Glycine max
tgtttggatcaagaagttta

SEQ ID NO: 1835 - DNA, 20 bp, Glycine max
ggtttttgaaccttcttgtt

SEQ ID NO: 1836 - DNA, 20 bp, Glycine max
acttcttgatccaaacaaga

SEQ ID NO: 1837 - DNA, 20 bp, Glycine max
aaggttcaaaaaccttcctc

SEQ ID NO: 1838 - DNA, 20 bp, Glycine max
aggttcaaaaaccttcctcc

SEQ ID NO: 1839 - DNA, 20 bp, Glycine max
aagaaaatggtcccggagga

SEQ ID NO: 1840 - DNA, 20 bp, Glycine max
gggaaagaaaatggtcccgg

SEQ ID NO: 1841 - DNA, 20 bp, Glycine max
atagggaaagaaaatggtcc

SEQ ID NO: 1842 - DNA, 20 bp, Glycine max
ccgattatagggaaagaaaa

SEQ ID NO: 1843 - DNA, 20 bp, Glycine max
ccattttctttccctataat

SEQ ID NO: 1844 - DNA, 20 bp, Glycine max
ggtggaggtttccgattata

SEQ ID NO: 1845 - DNA, 20 bp, Glycine max
tggtggaggtttccgattat

SEQ ID NO: 1846 - DNA, 20 bp, Glycine max
ggggttgcttgagttggtgg

SEQ ID NO: 1847 - DNA, 20 bp, Glycine max
ggaggggttgcttgagttgg

SEQ ID NO: 1848 - DNA, 20 bp, Glycine max
ggtggaggggttgcttgagt

SEQ ID NO: 1849 - DNA, 20 bp, Glycine max
gcatggaacgtgcggtggag

SEQ ID NO: 1850 - DNA, 20 bp, Glycine max
ggcatggaacgtgcggtgga

SEQ ID NO: 1851 - DNA, 20 bp, Glycine max
aggcatggaacgtgcggtgg

SEQ ID NO: 1852 - DNA, 20 bp, Glycine max
ataaggcatggaacgtgcgg

SEQ ID NO: 1853 - DNA, 20 bp, Glycine max
gtgataaggcatggaacgtg

SEQ ID NO: 1854 - DNA, 20 bp, Glycine max
catatttttgtgataaggca

SEQ ID NO: 1855 - DNA, 20 bp, Glycine max
agggccatatttttgtgata

SEQ ID NO: 1856 - DNA, 20 bp, Glycine max
catgccttatcacaaaaata

SEQ ID NO: 1857 - DNA, 20 bp, Glycine max
cgaaccagagggagaaaata

SEQ ID NO: 1858 - DNA, 20 bp, Glycine max
ccgaaccagagggagaaaat

SEQ ID NO: 1859 - DNA, 20 bp, Glycine max
atggccctattttctccctc

SEQ ID NO: 1860 - DNA, 20 bp, Glycine max
aaaacgggagccgaaccaga

SEQ ID NO: 1861 - DNA, 20 bp, Glycine max
cctattttctccctctggtt

SEQ ID NO: 1862 - DNA, 20 bp, Glycine max
caaaacgggagccgaaccag

SEQ ID NO: 1863 - DNA, 20 bp, Glycine max
cgaaacgacgacgacaaaac

SEQ ID NO: 1864 - DNA, 20 bp, Glycine max
acgaaacgacgacgacaaaa

SEQ ID NO: 1865 - DNA, 20 bp, Glycine max
cgtcgtttcgtcgccgctcg

SEQ ID NO: 1866 - DNA, 20 bp, Glycine max
aagcattcttgcaccgcgag

SEQ ID NO: 1867 - DNA, 20 bp, Glycine max
ggccaagacgatgtcgttct

SEQ ID NO: 1868 - DNA, 20 bp, Glycine max
caccaagaacgacatcgtct

SEQ ID NO: 1869 - DNA, 20 bp, Glycine max
ggtgaggaagtgagggcggt

SEQ ID NO: 1870 - DNA, 20 bp, Glycine max
tgccggtgaggaagtgaggg

SEQ ID NO: 1871 - DNA, 20 bp, Glycine max
acttgccggtgaggaagtga

SEQ ID NO: 1872 - DNA, 20 bp, Glycine max
tacttgccggtgaggaagtg

SEQ ID NO: 1873 - DNA, 20 bp, Glycine max
aaccgccctcacttcctcac

SEQ ID NO: 1874 - DNA, 20 bp, Glycine max
accctatatacttgccggtg

SEQ ID NO: 1875 - DNA, 20 bp, Glycine max
gttgtaccctatatacttgc

SEQ ID NO: 1876 - DNA, 20 bp, Glycine max
ttcctcaccggcaagtatat

SEQ ID NO: 1877 - DNA, 20 bp, Glycine max
tcctcaccggcaagtatata

SEQ ID NO: 1878 - DNA, 20 bp, Glycine max
gtagggggaaacggcgacgg

SEQ ID NO: 1879 - DNA, 20 bp, Glycine max
gccgtagggggaaacggcga

SEQ ID NO: 1880 - DNA, 20 bp, Glycine max
gtggtcgccgtagggggaaa

SEQ ID NO: 1881 - DNA, 20 bp, Glycine max
accgtcgccgtttcccccta

SEQ ID NO: 1882 - DNA, 20 bp, Glycine max
gcgccagtggtcgccgtagg

SEQ ID NO: 1883 - DNA, 20 bp, Glycine max
tgcgccagtggtcgccgtag

SEQ ID NO: 1884 - DNA, 20 bp, Glycine max
ttgcgccagtggtcgccgta

SEQ ID NO: 1885 - DNA, 20 bp, Glycine max
gttgcgccagtggtcgccgt

SEQ ID NO: 1886 - DNA, 20 bp, Glycine max
tttccccctacggcgaccac

SEQ ID NO: 1887 - DNA, 20 bp, Glycine max
tgcggcggaggttgcgccag

SEQ ID NO: 1888 - DNA, 20 bp, Glycine max
cgagcgccatgatgcggcgg

SEQ ID NO: 1889 - DNA, 20 bp, Glycine max
cctcgagcgccatgatgcgg

SEQ ID NO: 1890 - DNA, 20 bp, Glycine max
gcgcaacctccgccgcatca

SEQ ID NO: 1891 - DNA, 20 bp, Glycine max
gaacctcgagcgccatgatg

SEQ ID NO: 1892 - DNA, 20 bp, Glycine max
ccgccgcatcatggcgctcg

SEQ ID NO: 1893 - DNA, 20 bp, Glycine max
tcgaggttctctccacccac

SEQ ID NO: 1894 - DNA, 20 bp, Glycine max
gaaggagtttatccggtggg

SEQ ID NO: 1895 - DNA, 20 bp, Glycine max
caagaaggagtttatccggt

SEQ ID NO: 1896 - DNA, 20 bp, Glycine max
ccaagaaggagtttatccgg

SEQ ID NO: 1897 - DNA, 20 bp, Glycine max
tttccaagaaggagtttatc

SEQ ID NO: 1898 - DNA, 20 bp, Glycine max
ccaccggataaactccttct

SEQ ID NO: 1899 - DNA, 20 bp, Glycine max
gtccctccgattttccaaga

SEQ ID NO: 1900 - DNA, 20 bp, Glycine max
taaactccttcttggaaaat

SEQ ID NO: 1901 - DNA, 20 bp, Glycine max
actccttcttggaaaatcgg

SEQ ID NO: 1902 - DNA, 20 bp, Glycine max
ctccttcttggaaaatcgga

SEQ ID NO: 1903 - DNA, 20 bp, Glycine max
atcggagggacgagatcatg

SEQ ID NO: 1904 - DNA, 20 bp, Glycine max
ggctcgtgcaaaagcttgct

SEQ ID NO: 1905 - DNA, 20 bp, Glycine max
gctcgtgcaaaagcttgctc

SEQ ID NO: 1906 - DNA, 20 bp, Glycine max
cttgctcgggactcgcgcaa

SEQ ID NO: 1907 - DNA, 20 bp, Glycine max
cctggatttaagttctactt

SEQ ID NO: 1908 - DNA, 20 bp, Glycine max
ccaaagtagaacttaaatcc

SEQ ID NO: 1909 - DNA, 20 bp, Glycine max
ccttataaactactgttacc

SEQ ID NO: 1910 - DNA, 20 bp, Glycine max
ccaggtaacagtagtttata

SEQ ID NO: 1911 - DNA, 20 bp, Glycine max
tacttagtaatgtttattta

SEQ ID NO: 1912 - DNA, 20 bp, Glycine max
aaacattactaagtatactt

SEQ ID NO: 1913 - DNA, 20 bp, Glycine max
acaaattaaaaattaagaga

SEQ ID NO: 1914 - DNA, 20 bp, Glycine max
tatcatgtttttcaatgaaa

SEQ ID NO: 1915 - DNA, 20 bp, Glycine max
tacttacatttaaaattagc

SEQ ID NO: 1916 - DNA, 20 bp, Glycine max
aatgtaagtatcaaataaaa

SEQ ID NO: 1917 - DNA, 20 bp, Glycine max
aacccgtgcattaggaacaa

SEQ ID NO: 1918 - DNA, 20 bp, Glycine max
taacccgtgcattaggaaca

SEQ ID NO: 1919 - DNA, 20 bp, Glycine max
taacccttgttcctaatgca

SEQ ID NO: 1920 - DNA, 20 bp, Glycine max
ttattaataacccgtgcatt

SEQ ID NO: 1921 - DNA, 20 bp, Glycine max
aacccttgttcctaatgcac

SEQ ID NO: 1922 - DNA, 20 bp, Glycine max
atgaaatccagtataataaa

SEQ ID NO: 1923 - DNA, 20 bp, Glycine max
aataaaaccttttattatac

SEQ ID NO: 1924 - DNA, 20 bp, Glycine max
ctccgaaaacctggattcag

SEQ ID NO: 1925 - DNA, 20 bp, Glycine max
tctataaaacctctgaatcc

SEQ ID NO: 1926 - DNA, 20 bp, Glycine max
aacctctgaatccaggtttt

SEQ ID NO: 1927 - DNA, 20 bp, Glycine max
aaatgtcatctccgaaaacc

SEQ ID NO: 1928 - DNA, 20 bp, Glycine max
tgacatttaacactataatg

SEQ ID NO: 1929 - DNA, 20 bp, Glycine max
atttaacactataatgagga

SEQ ID NO: 1930 - DNA, 20 bp, Glycine max
actataatgaggatggtgtc

SEQ ID NO: 1931 - DNA, 20 bp, Glycine max
ctataatgaggatggtgtca

SEQ ID NO: 1932 - DNA, 20 bp, Glycine max
tgaggatggtgtcagggaag

SEQ ID NO: 1933 - DNA, 20 bp, Glycine max
gtgtcagggaagaggtacta

SEQ ID NO: 1934 - DNA, 20 bp, Glycine max
ctgtgatgtgagtgatgtac

SEQ ID NO: 1935 - DNA, 20 bp, Glycine max
tgagtgatgtacaggaagca

SEQ ID NO: 1936 - DNA, 20 bp, Glycine max
tagagagatcattaaagagt

SEQ ID NO: 1937 - DNA, 20 bp, Glycine max
attaaagagttggtgacgtt

SEQ ID NO: 1938 - DNA, 20 bp, Glycine max
aaagagttggtgacgttagg

SEQ ID NO: 1939 - DNA, 20 bp, Glycine max
aagagttggtgacgttagga

SEQ ID NO: 1940 - DNA, 20 bp, Glycine max
agagttggtgacgttaggag

SEQ ID NO: 1941 - DNA, 20 bp, Glycine max
ttaggaggggctaataaccc

SEQ ID NO: 1942 - DNA, 20 bp, Glycine max
taggaggggctaataaccct

SEQ ID NO: 1943 - DNA, 20 bp, Glycine max
aggaggggctaataaccctg

SEQ ID NO: 1944 - DNA, 20 bp, Glycine max
gcaaagccaagaagtcccca

SEQ ID NO: 1945 - DNA, 20 bp, Glycine max
agcaaagccaagaagtcccc

SEQ ID NO: 1946 - DNA, 20 bp, Glycine max
taataaccctggggacttct

SEQ ID NO: 1947 - DNA, 20 bp, Glycine max
gggacttcttggctttgctt

SEQ ID NO: 1948 - DNA, 20 bp, Glycine max
acttcttggctttgcttagg

SEQ ID NO: 1949 - DNA, 20 bp, Glycine max
cttaggtggtttgattttga

SEQ ID NO: 1950 - DNA, 20 bp, Glycine max
gtggtttgattttgatggtt

SEQ ID NO: 1951 - DNA, 20 bp, Glycine max
gtttggagaagagactaaag

SEQ ID NO: 1952 - DNA, 20 bp, Glycine max
gagtccttgtaaaaacgcat

SEQ ID NO: 1953 - DNA, 20 bp, Glycine max
agaaccgatgcgtttttaca

SEQ ID NO: 1954 - DNA, 20 bp, Glycine max
ctcattgatcagcatcgtaa

SEQ ID NO: 1955 - DNA, 20 bp, Glycine max
aagatgatctatcatagtat

SEQ ID NO: 1956 - DNA, 20 bp, Glycine max
atttgatcggtgtaatattc

SEQ ID NO: 1957 - DNA, 20 bp, Glycine max
aagtcctttgatgatttgat

SEQ ID NO: 1958 - DNA, 20 bp, Glycine max
tacaccgatcaaatcatcaa

SEQ ID NO: 1959 - DNA, 20 bp, Glycine max
aatcatcaaaggacttgcac

SEQ ID NO: 1960 - DNA, 20 bp, Glycine max
tagtgcgtagtacgtgtgtt

SEQ ID NO: 1961 - DNA, 20 bp, Glycine max
tagtacgtgtgtttggaaat

SEQ ID NO: 1962 - DNA, 20 bp, Glycine max
tgtattaataaatatattgt

SEQ ID NO: 1963 - DNA, 20 bp, Glycine max
gtattaataaatatattgtc

SEQ ID NO: 1964 - DNA, 20 bp, Glycine max
cagctatatagctcagtata

SEQ ID NO: 1965 - DNA, 20 bp, Glycine max
ttatcctaatcttgaatatg

SEQ ID NO: 1966 - DNA, 20 bp, Glycine max
gcagccacatattcaagatt

SEQ ID NO: 1967 - DNA, 20 bp, Glycine max
tgcataaaacaaaatagtac

SEQ ID NO: 1968 - DNA, 20 bp, Glycine max
acaggaaaagaagataagaa

SEQ ID NO: 1969 - DNA, 20 bp, Glycine max
ggcagcatagtgtagatgca

SEQ ID NO: 1970 - DNA, 20 bp, Glycine max
gatgcatggaacattaaaaa

SEQ ID NO: 1971 - DNA, 20 bp, Glycine max
aaaaatggcagttgtgcctg

SEQ ID NO: 1972 - DNA, 20 bp, Glycine max
cttgggtctcttggggccac

SEQ ID NO: 1973 - DNA, 20 bp, Glycine max
gtcaacacttgggtctcttg

SEQ ID NO: 1974 - DNA, 20 bp, Glycine max
agtcaacacttgggtctctt

SEQ ID NO: 1975 - DNA, 20 bp, Glycine max
aagtcaacacttgggtctct

SEQ ID NO: 1976 - DNA, 20 bp, Glycine max
aggctcacaagtcaacactt

SEQ ID NO: 1977 - DNA, 20 bp, Glycine max
caggctcacaagtcaacact

SEQ ID NO: 1978 - DNA, 20 bp, Glycine max
gttgacttgtgagcctgcac

SEQ ID NO: 1979 - DNA, 20 bp, Glycine max
attggtctcaggaccagtgc

SEQ ID NO: 1980 - DNA, 20 bp, Glycine max
ccaacactcccattggtctc

SEQ ID NO: 1981 - DNA, 20 bp, Glycine max
tgcactggtcctgagaccaa

SEQ ID NO: 1982 - DNA, 20 bp, Glycine max
gcactggtcctgagaccaat

SEQ ID NO: 1983 - DNA, 20 bp, Glycine max
ttcgtttccaacactcccat

SEQ ID NO: 1984 - DNA, 20 bp, Glycine max
cctgagaccaatgggagtgt

SEQ ID NO: 1985 - DNA, 20 bp, Glycine max
gagtgttggaaacgaaaact

SEQ ID NO: 1986 - DNA, 20 bp, Glycine max
aatagtgcttgattgtcgtg

SEQ ID NO: 1987 - DNA, 20 bp, Glycine max
gattgtcgtgtggaatatat

SEQ ID NO: 1988 - DNA, 20 bp, Glycine max
aagaagaagaaaaaaaaaag

SEQ ID NO: 1989 - DNA, 20 bp, Glycine max
tttttttcttcttcttcttt

SEQ ID NO: 1990 - DNA, 20 bp, Glycine max
aaatatcaatataacaaata

SEQ ID NO: 1991 - DNA, 20 bp, Glycine max
gttatattgatatttatttt

SEQ ID NO: 1992 - DNA, 20 bp, Glycine max
ttatttttggacttctttac

SEQ ID NO: 1993 - DNA, 20 bp, Glycine max
ttacaggtaatgctacttgc

SEQ ID NO: 1994 - DNA, 20 bp, Glycine max
catcagcagtaactttagaa

SEQ ID NO: 1995 - DNA, 20 bp, Glycine max
atcagcagtaactttagaat

SEQ ID NO: 1996 - DNA, 20 bp, Glycine max
ccttctttaatatttctgga

SEQ ID NO: 1997 - DNA, 20 bp, Glycine max
tttgccttctttaatatttc

SEQ ID NO: 1998 - DNA, 20 bp, Glycine max
ccatccagaaatattaaaga

SEQ ID NO: 1999 - DNA, 20 bp, Glycine max
aatgaattagacactcatat

SEQ ID NO: 2000 - DNA, 20 bp, Glycine max
taagggagttttggaatgtc

SEQ ID NO: 2001 - DNA, 20 bp, Glycine max
ctttgaaggtaagggagttt

SEQ ID NO: 2002 - DNA, 20 bp, Glycine max
aaacaatgctttgaaggtaa

SEQ ID NO: 2003 - DNA, 20 bp, Glycine max
taaacaatgctttgaaggta

SEQ ID NO: 2004 - DNA, 20 bp, Glycine max
tctcataaacaatgctttga

SEQ ID NO: 2005 - DNA, 20 bp, Glycine max
ggtaccaacattggagcagc

SEQ ID NO: 2006 - DNA, 20 bp, Glycine max
gcatcctgctgctccaatgt

SEQ ID NO: 2007 - DNA, 20 bp, Glycine max
gacaaatggggtaccaacat

SEQ ID NO: 2008 - DNA, 20 bp, Glycine max
caatcttctgaagacaaatg

SEQ ID NO: 2009 - DNA, 20 bp, Glycine max
gcaatcttctgaagacaaat

SEQ ID NO: 2010 - DNA, 20 bp, Glycine max
tgcaatcttctgaagacaaa

SEQ ID NO: 2011 - DNA, 20 bp, Glycine max
tcttcagaagattgcaccat

SEQ ID NO: 2012 - DNA, 20 bp, Glycine max
tgggatattatattctccta

SEQ ID NO: 2013 - DNA, 20 bp, Glycine max
ccaacaaaattgtgttttgt

SEQ ID NO: 2014 - DNA, 20 bp, Glycine max
accaacaaaattgtgttttg

SEQ ID NO: 2015 - DNA, 20 bp, Glycine max
cccacaaaacacaattttgt

SEQ ID NO: 2016 - DNA, 20 bp, Glycine max
caattttgttggtgaatgct

SEQ ID NO: 2017 - DNA, 20 bp, Glycine max
aattttgttggtgaatgctt

SEQ ID NO: 2018 - DNA, 20 bp, Glycine max
caacttgggatctctatgaa

SEQ ID NO: 2019 - DNA, 20 bp, Glycine max
ttcatagagatcccaagttg

SEQ ID NO: 2020 - DNA, 20 bp, Glycine max
gttgggtcactccacaactt

SEQ ID NO: 2021 - DNA, 20 bp, Glycine max
tgttgggtcactccacaact

SEQ ID NO: 2022 - DNA, 20 bp, Glycine max
tctcaggcttaaagtgtgtt

SEQ ID NO: 2023 - DNA, 20 bp, Glycine max
ctctcaggcttaaagtgtgt

SEQ ID NO: 2024 - DNA, 20 bp, Glycine max
caacacactttaagcctgag

SEQ ID NO: 2025 - DNA, 20 bp, Glycine max
ctttcattctcaaacctctc

SEQ ID NO: 2026 - DNA, 20 bp, Glycine max
gcaaacaagttacttccatt

SEQ ID NO: 2027 - DNA, 20 bp, Glycine max
caaacaagttacttccattt

SEQ ID NO: 2028 - DNA, 20 bp, Glycine max
gccctcctccctaacccaaa

SEQ ID NO: 2029 - DNA, 20 bp, Glycine max
aagttacttccatttgggtt

SEQ ID NO: 2030 - DNA, 20 bp, Glycine max
agttacttccatttgggtta

SEQ ID NO: 2031 - DNA, 20 bp, Glycine max
tacttccatttgggttaggg

SEQ ID NO: 2032 - DNA, 20 bp, Glycine max
ttccatttgggttagggagg

SEQ ID NO: 2033 - DNA, 20 bp, Glycine max
tccatttgggttagggagga

SEQ ID NO: 2034 - DNA, 20 bp, Glycine max
ttagggaggagggcttgccc

SEQ ID NO: 2035 - DNA, 20 bp, Glycine max
gttgagccaagttagctcca

SEQ ID NO: 2036 - DNA, 20 bp, Glycine max
cgttgagccaagttagctcc

SEQ ID NO: 2037 - DNA, 20 bp, Glycine max
ggcttgccctggagctaact

SEQ ID NO: 2038 - DNA, 20 bp, Glycine max
acgcacactgagcttaactc

SEQ ID NO: 2039 - DNA, 20 bp, Glycine max
ctcaaaacattggattaata

SEQ ID NO: 2040 - DNA, 20 bp, Glycine max
tccttttccactcaaaacat

SEQ ID NO: 2041 - DNA, 20 bp, Glycine max
tattaatccaatgttttgag

SEQ ID NO: 2042 - DNA, 20 bp, Glycine max
tccaatgttttgagtggaaa

SEQ ID NO: 2043 - DNA, 20 bp, Glycine max
aaagaaattgatatgactga

SEQ ID NO: 2044 - DNA, 20 bp, Glycine max
aattgatatgactgaaggaa

SEQ ID NO: 2045 - DNA, 20 bp, Glycine max
attgatatgactgaaggaaa

SEQ ID NO: 2046 - DNA, 20 bp, Glycine max
acttggcacatagcttctaa

SEQ ID NO: 2047 - DNA, 20 bp, Glycine max
cacttggcacatagcttcta

SEQ ID NO: 2048 - DNA, 20 bp, Glycine max
ctgtcagtgattggcacact

SEQ ID NO: 2049 - DNA, 20 bp, Glycine max
tatccttaactgtcagtgat

SEQ ID NO: 2050 - DNA, 20 bp, Glycine max
gtgccaatcactgacagtta

SEQ ID NO: 2051 - DNA, 20 bp, Glycine max
tatttattcaatgttttgag

SEQ ID NO: 2052 - DNA, 20 bp, Glycine max
tgagtggaaacgaactagta

SEQ ID NO: 2053 - DNA, 20 bp, Glycine max
gaagaaattgatatgactga

SEQ ID NO: 2054 - DNA, 20 bp, Glycine max
attgatatgactgaaggaaa

SEQ ID NO: 2055 - DNA, 20 bp, Glycine max
ttgatatgactgaaggaaaa

SEQ ID NO: 2056 - DNA, 20 bp, Glycine max
gaaaagggatcactgtgcca

SEQ ID NO: 2057 - DNA, 20 bp, Glycine max
gcttctaaaggaaatttcct

SEQ ID NO: 2058 - DNA, 20 bp, Glycine max
acttggcacatagcttctaa

SEQ ID NO: 2059 - DNA, 20 bp, Glycine max
ttgttggtgattgacacact

SEQ ID NO: 2060 - DNA, 20 bp, Glycine max
acaaaatatccttaaattgt

SEQ ID NO: 2061 - DNA, 20 bp, Glycine max
tgtcaatcaccaacaattta

SEQ ID NO: 2062 - DNA, 20 bp, Glycine max
tgttcgaagaagatataaaa

SEQ ID NO: 2063 - DNA, 20 bp, Glycine max
cttgtgttaaaataaaacat

SEQ ID NO: 2064 - DNA, 20 bp, Glycine max
aacttaaaagcaaaaaatgc

SEQ ID NO: 2065 - DNA, 20 bp, Glycine max
ttatactgaaaagagaagaa

SEQ ID NO: 2066 - DNA, 20 bp, Glycine max
atatagtgtgcatgtgtgtt

SEQ ID NO: 2067 - DNA, 20 bp, Glycine max
ttcggttgagaagagttttg

SEQ ID NO: 2068 - DNA, 20 bp, Glycine max
tggaattttgagttttaata

SEQ ID NO: 2069 - DNA, 20 bp, Glycine max
ggaattttgagttttaatat

SEQ ID NO: 2070 - DNA, 20 bp, Glycine max
ttttgagttttaatatgggc

SEQ ID NO: 2071 - DNA, 20 bp, Glycine max
tttgagttttaatatgggcc

SEQ ID NO: 2072 - DNA, 20 bp, Glycine max
aaaataagaggtatgagacc

SEQ ID NO: 2073 - DNA, 20 bp, Glycine max
tttggtaggtaaaaaataag

SEQ ID NO: 2074 - DNA, 20 bp, Glycine max
attaataaaagtgatttggt

SEQ ID NO: 2075 - DNA, 20 bp, Glycine max
ttgaattaataaaagtgatt

SEQ ID NO: 2076 - DNA, 20 bp, Glycine max
taaaatggagtgaaatatat

SEQ ID NO: 2077 - DNA, 20 bp, Glycine max
aggggaaaaaaagaataaaa

SEQ ID NO: 2078 - DNA, 20 bp, Glycine max
atggtgagtttggttgtgag

SEQ ID NO: 2079 - DNA, 20 bp, Glycine max
tatggtgagtttggttgtga

SEQ ID NO: 2080 - DNA, 20 bp, Glycine max
ttatggtgagtttggttgtg

SEQ ID NO: 2081 - DNA, 20 bp, Glycine max
agtcacatttatggtgagtt

SEQ ID NO: 2082 - DNA, 20 bp, Glycine max
ccaatgttaagtcacattta

SEQ ID NO: 2083 - DNA, 20 bp, Glycine max
ccataaatgtgacttaacat

SEQ ID NO: 2084 - DNA, 20 bp, Glycine max
ttggctttgtgtctgcttcg

SEQ ID NO: 2085 - DNA, 20 bp, Glycine max
ccttttatttagattagtgt

SEQ ID NO: 2086 - DNA, 20 bp, Glycine max
ccgacactaatctaaataaa

SEQ ID NO: 2087 - DNA, 20 bp, Glycine max
ctatttgtgttgaccaataa

SEQ ID NO: 2088 - DNA, 20 bp, Glycine max
tatttgtgttgaccaataaa

SEQ ID NO: 2089 - DNA, 20 bp, Glycine max
tattgattgtcaccctttat

SEQ ID NO: 2090 - DNA, 1912 bp, Glycine max
tatatatagtggaagaaaaagaccacacagtgaatttgggtaatctaaattaaagattattttaaaataaaaaggtaaagtcataatttttaattaaaattaataacaaaaatacgcataaatatataaaatatttaagtcattcaatattatttttcaattaataattataatttttatgtttctaaaatgcattcaaattcgatggacatctactttaatttcaaacaaattagtctaggaagatctttgtcgtaagtcatgattgaatttgcaattttaaccgcaacaaattaaaaatttgtcaagccaacatataacggtggatatttaagcacagaaagcaagctggaatggagacaacaattttataagatgatagttgcacacttttttgcttaaaaagttatattgttatatatataaaaagttggtttgaaaaaaccaccatgtatgtggaaaattgcgtacatatatcaatcttcgataacattcttcttacatatatctgcatttaaataggaaaaaggttaggtccactacatctgctcctaaccataaaaaggcctagcagcattccattcagtggaatctagcaactaccaaaaccaatctctttcaataatcaacaacaatgacaaacttgaagcctctaattctcttcttttatctcctagccattgttgttatgatttcaataccatcaagccactgcagcagaaccttgcttccagaaaacgaaaagctgatagagaacacttgcaagaaaactcccaactacaacgtttgccttgagtctctgaaggcaagccctgggagctccagtgctgacgtcacagggctggctcaaatcatggtcaaagagatgaaggccaaagcaaacgatgcattgaaaagaatccaagagttgcagagggtgggagcatcggggcctaagcaaagaagagccttgagttcttgtgctgataaatacaaagcggttttaattgctgatgttccacaagccactgaggctctgcagaaaggtgaccccaagtttgctgaagatggggctaatgatgctgctaatgaggctacttattgtgagactgatttctctgcagcagggaattccccactcaccaaacagaacaatgctatgcatgatgttgctgctgttactgccgctattgttagattgttgctctaaactatatatacttaattgtactgttaactgtaatgtgaaaatactatctattttaaagctttttataaaatgtttattatatgtaataaaatccaaccctctcgtgattctcacgagttccccagatatctaatttgcattgagacaagtatcatagttgctctttactttttgatcttcgtctgaagattttgatattttcatttccttttgcttaaaggttttaagaatctgtttgcaatcacaactacacattatcattgcaattatggtcacatcaactacgtttgattgtaatttttcataatatcaagaattgtacgtgatgcaatcacaaatgtgacagtggtactttttctctctctgttttctacaactaattttttttttcaagaaaaaaatatatcgaagacatagttaaacgccaaataagaacgcttctccaataaaaataaataaatagaaccttgatttgtcatgctaagaggtactaacccatgctaaaagaccaaactccgttttgtaagagaaaccttaaacatgatattaacgtattataagaggaagacacgtagctgcgtttttgcaggcaatttatcctttggtttttgttaacaaaaatatggagagagacatatgtatatgtatgtgtatatccttttttcaattattgggaattgcggataagcatatctgatatcttgttcttgtctttgctttttc

SEQ ID NO: 2091 - DNA, 555 bp, Glycine max
atgacaaacttgaagcctctaattctcttcttttatctcctagccattgttgttatgatttcaataccatcaagccactgcagcagaaccttgcttccagaaaacgaaaagctgatagagaacacttgcaagaaaactcccaactacaacgtttgccttgagtctctgaaggcaagccctgggagctccagtgctgacgtcacagggctggctcaaatcatggtcaaagagatgaaggccaaagcaaacgatgcattgaaaagaatccaagagttgcagagggtgggagcatcggggcctaagcaaagaagagccttgagttcttgtgctgataaatacaaagcggttttaattgctgatgttccacaagccactgaggctctgcagaaaggtgaccccaagtttgctgaagatggggctaatgatgctgctaatgaggctacttattgtgagactgatttctctgcagcagggaattccccactcaccaaacagaacaatgctatgcatgatgttgctgctgttactgccgctattgttagattgttgctctaa

SEQ ID NO: 2092 - protein, 184 aa, Glycine max
MTNLKPLILFFYLLAIVVMISIPSSHCSRTLLPENEKLIENTCKKTPNYNVCLESLKASPGSSSADVTGLAQIMVKEMKAKANDALKRIQELQRVGASGPKQRRALSSCADKYKAVLIADVPQATEALQKGDPKFAEDGANDAANEATYCETDFSAAGNSPLTKQNNAMHDVAAVTAAIVRLLL

SEQ ID NO: 2093 - DNA, 20 bp, Glycine max
gattacccaaattcactgtg

SEQ ID NO: 2094 - DNA, 20 bp, Glycine max
aaaagaccacacagtgaatt

SEQ ID NO: 2095 - DNA, 20 bp, Glycine max
aaagaccacacagtgaattt

SEQ ID NO: 2096 - DNA, 20 bp, Glycine max
aagattattttaaaataaaa

SEQ ID NO: 2097 - DNA, 20 bp, Glycine max
taaaatgcattcaaattcga

SEQ ID NO: 2098 - DNA, 20 bp, Glycine max
aatttcaaacaaattagtct

SEQ ID NO: 2099 - DNA, 20 bp, Glycine max
gacaaatttttaatttgttg

SEQ ID NO: 2100 - DNA, 20 bp, Glycine max
aaatatccaccgttatatgt

SEQ ID NO: 2101 - DNA, 20 bp, Glycine max
tttgtcaagccaacatataa

SEQ ID NO: 2102 - DNA, 20 bp, Glycine max
gtcaagccaacatataacgg

SEQ ID NO: 2103 - DNA, 20 bp, Glycine max
tttaagcacagaaagcaagc

SEQ ID NO: 2104 - DNA, 20 bp, Glycine max
gcacagaaagcaagctggaa

SEQ ID NO: 2105 - DNA, 20 bp, Glycine max
ttgttatatatataaaaagt

SEQ ID NO: 2106 - DNA, 20 bp, Glycine max
gcaattttccacatacatgg

SEQ ID NO: 2107 - DNA, 20 bp, Glycine max
tgaaaaaaccaccatgtatg

SEQ ID NO: 2108 - DNA, 20 bp, Glycine max
tacgcaattttccacataca

SEQ ID NO: 2109 - DNA, 20 bp, Glycine max
acatatatctgcatttaaat

SEQ ID NO: 2110 - DNA, 20 bp, Glycine max
tctgcatttaaataggaaaa

SEQ ID NO: 2111 - DNA, 20 bp, Glycine max
atttaaataggaaaaaggtt

SEQ ID NO: 2112 - DNA, 20 bp, Glycine max
atggttaggagcagatgtag

SEQ ID NO: 2113 - DNA, 20 bp, Glycine max
tgctaggcctttttatggtt

SEQ ID NO: 2114 - DNA, 20 bp, Glycine max
atctgctcctaaccataaaa

SEQ ID NO: 2115 - DNA, 20 bp, Glycine max
aatgctgctaggccttttta

SEQ ID NO: 2116 - DNA, 20 bp, Glycine max
ccactgaatggaatgctgct

SEQ ID NO: 2117 - DNA, 20 bp, Glycine max
cctagcagcattccattcag

SEQ ID NO: 2118 - DNA, 20 bp, Glycine max
agttgctagattccactgaa

SEQ ID NO: 2119 - DNA, 20 bp, Glycine max
ttattgaaagagattggttt

SEQ ID NO: 2120 - DNA, 20 bp, Glycine max
tgttgattattgaaagagat

SEQ ID NO: 2121 - DNA, 20 bp, Glycine max
agataaaagaagagaattag

SEQ ID NO: 2122 - DNA, 20 bp, Glycine max
aaatcataacaacaatggct

SEQ ID NO: 2123 - DNA, 20 bp, Glycine max
tattgaaatcataacaacaa

SEQ ID NO: 2124 - DNA, 20 bp, Glycine max
gttctgctgcagtggcttga

SEQ ID NO: 2125 - DNA, 20 bp, Glycine max
gaagcaaggttctgctgcag

SEQ ID NO: 2126 - DNA, 20 bp, Glycine max
cttttcgttttctggaagca

SEQ ID NO: 2127 - DNA, 20 bp, Glycine max
tctatcagcttttcgttttc

SEQ ID NO: 2128 - DNA, 20 bp, Glycine max
tcaaggcaaacgttgtagtt

SEQ ID NO: 2129 - DNA, 20 bp, Glycine max
ctcaaggcaaacgttgtagt

SEQ ID NO: 2130 - DNA, 20 bp, Glycine max
ggcttgccttcagagactca

SEQ ID NO: 2131 - DNA, 20 bp, Glycine max
cgtttgccttgagtctctga

SEQ ID NO: 2132 - DNA, 20 bp, Glycine max
gagtctctgaaggcaagccc

SEQ ID NO: 2133 - DNA, 20 bp, Glycine max
agtctctgaaggcaagccct

SEQ ID NO: 2134 - DNA, 20 bp, Glycine max
cgtcagcactggagctccca

SEQ ID NO: 2135 - DNA, 20 bp, Glycine max
acgtcagcactggagctccc

SEQ ID NO: 2136 - DNA, 20 bp, Glycine max
cagccctgtgacgtcagcac

SEQ ID NO: 2137 - DNA, 20 bp, Glycine max
agctccagtgctgacgtcac

SEQ ID NO: 2138 - DNA, 20 bp, Glycine max
gctccagtgctgacgtcaca

SEQ ID NO: 2139 - DNA, 20 bp, Glycine max
cagtgctgacgtcacagggc

SEQ ID NO: 2140 - DNA, 20 bp, Glycine max
cacagggctggctcaaatca

SEQ ID NO: 2141 - DNA, 20 bp, Glycine max
aatcatggtcaaagagatga

SEQ ID NO: 2142 - DNA, 20 bp, Glycine max
tttcaatgcatcgtttgctt

SEQ ID NO: 2143 - DNA, 20 bp, Glycine max
ctcccaccctctgcaactct

SEQ ID NO: 2144 - DNA, 20 bp, Glycine max
aaagaatccaagagttgcag

SEQ ID NO: 2145 - DNA, 20 bp, Glycine max
aagaatccaagagttgcaga

SEQ ID NO: 2146 - DNA, 20 bp, Glycine max
aatccaagagttgcagaggg

SEQ ID NO: 2147 - DNA, 20 bp, Glycine max
atccaagagttgcagagggt

SEQ ID NO: 2148 - DNA, 20 bp, Glycine max
gttgcagagggtgggagcat

SEQ ID NO: 2149 - DNA, 20 bp, Glycine max
ttgcagagggtgggagcatc

SEQ ID NO: 2150 - DNA, 20 bp, Glycine max
tgcagagggtgggagcatcg

SEQ ID NO: 2151 - DNA, 20 bp, Glycine max
ctcaaggctcttctttgctt

SEQ ID NO: 2152 - DNA, 20 bp, Glycine max
tttatcagcacaagaactca

SEQ ID NO: 2153 - DNA, 20 bp, Glycine max
ttgtgctgataaatacaaag

SEQ ID NO: 2154 - DNA, 20 bp, Glycine max
tgcagagcctcagtggcttg

SEQ ID NO: 2155 - DNA, 20 bp, Glycine max
tgatgttccacaagccactg

SEQ ID NO: 2156 - DNA, 20 bp, Glycine max
acctttctgcagagcctcag

SEQ ID NO: 2157 - DNA, 20 bp, Glycine max
gccactgaggctctgcagaa

SEQ ID NO: 2158 - DNA, 20 bp, Glycine max
ccccatcttcagcaaacttg

SEQ ID NO: 2159 - DNA, 20 bp, Glycine max
gccccatcttcagcaaactt

SEQ ID NO: 2160 - DNA, 20 bp, Glycine max
agccccatcttcagcaaact

SEQ ID NO: 2161 - DNA, 20 bp, Glycine max
gaccccaagtttgctgaaga

SEQ ID NO: 2162 - DNA, 20 bp, Glycine max
accccaagtttgctgaagat

SEQ ID NO: 2163 - DNA, 20 bp, Glycine max
ccccaagtttgctgaagatg

SEQ ID NO: 2164 - DNA, 20 bp, Glycine max
ggctaatgatgctgctaatg

SEQ ID NO: 2165 - DNA, 20 bp, Glycine max
gagactgatttctctgcagc

SEQ ID NO: 2166 - DNA, 20 bp, Glycine max
agactgatttctctgcagca

SEQ ID NO: 2167 - DNA, 20 bp, Glycine max
attgttctgtttggtgagtg

SEQ ID NO: 2168 - DNA, 20 bp, Glycine max
cattgttctgtttggtgagt

SEQ ID NO: 2169 - DNA, 20 bp, Glycine max
gcattgttctgtttggtgag

SEQ ID NO: 2170 - DNA, 20 bp, Glycine max
atgcatagcattgttctgtt

SEQ ID NO: 2171 - DNA, 20 bp, Glycine max
gagcaacaatctaacaatag

SEQ ID NO: 2172 - DNA, 20 bp, Glycine max
cgtgagaatcacgagagggt

SEQ ID NO: 2173 - DNA, 20 bp, Glycine max
aactcgtgagaatcacgaga

SEQ ID NO: 2174 - DNA, 20 bp, Glycine max
gaactcgtgagaatcacgag

SEQ ID NO: 2175 - DNA, 20 bp, Glycine max
caatgcaaattagatatctg

SEQ ID NO: 2176 - DNA, 20 bp, Glycine max
tcaatgcaaattagatatct

SEQ ID NO: 2177 - DNA, 20 bp, Glycine max
ctcaatgcaaattagatatc

SEQ ID NO: 2178 - DNA, 20 bp, Glycine max
tcttaaaacctttaagcaaa

SEQ ID NO: 2179 - DNA, 20 bp, Glycine max
tttcatttccttttgcttaa

SEQ ID NO: 2180 - DNA, 20 bp, Glycine max
acacattatcattgcaatta

SEQ ID NO: 2181 - DNA, 20 bp, Glycine max
tgcaatcacaaatgtgacag

SEQ ID NO: 2182 - DNA, 20 bp, Glycine max
attggagaagcgttcttatt

SEQ ID NO: 2183 - DNA, 20 bp, Glycine max
ttctatttatttatttttat

SEQ ID NO: 2184 - DNA, 20 bp, Glycine max
cctcttagcatgacaaatca

SEQ ID NO: 2185 - DNA, 20 bp, Glycine max
ccttgatttgtcatgctaag

SEQ ID NO: 2186 - DNA, 20 bp, Glycine max
ggagtttggtcttttagcat

SEQ ID NO: 2187 - DNA, 20 bp, Glycine max
cggagtttggtcttttagca

SEQ ID NO: 2188 - DNA, 20 bp, Glycine max
ttctcttacaaaacggagtt

SEQ ID NO: 2189 - DNA, 20 bp, Glycine max
ttaaggtttctcttacaaaa

SEQ ID NO: 2190 - DNA, 20 bp, Glycine max
atacgttaatatcatgttta

SEQ ID NO: 2191 - DNA, 20 bp, Glycine max
tgatattaacgtattataag

SEQ ID NO: 2192 - DNA, 20 bp, Glycine max
acacgtagctgcgtttttgc

SEQ ID NO: 2193 - DNA, 20 bp, Glycine max
tttgcaggcaatttatcctt

SEQ ID NO: 2194 - DNA, 20 bp, Glycine max
tttttgttaacaaaaaccaa

SEQ ID NO: 2195 - DNA, 20 bp, Glycine max
ggtttttgttaacaaaaata

SEQ ID NO: 2196 - DNA, 20 bp, Glycine max
aattcccaataattgaaaaa

SEQ ID NO: 2197 - DNA, 20 bp, Glycine max
tatatccttttttcaattat

SEQ ID NO: 2198 - DNA, 20 bp, Glycine max
atatccttttttcaattatt

SEQ ID NO: 2199 - DNA, 20 bp, Glycine max
ttttcaattattgggaattg

SEQ ID NO: 2200 - DNA, 1760 bp, Glycine max
ctatagtacatcgtttgaatgcaaatttgagcctaacatctactttttcattgtttttattattattttttaaaaaaaaatcattgattaataatgaaagataaataaaaagttaaattatactgcactgtttttgtttgagaattaaatatgcactacattttaatttagtgtgaatggatttttaaggatggtttttttcttctcaatataattcttagcattattggcaattagtttttatcaactaggaattttcagaagatgatacaatacttttgagttaagttttaaagtatacagtaaaggtaagaatttcacataatttttaatcgtataaagatatatatatattgttcttttttcttcttctagaaaatggtacgattaactaaaataaatgcatgttctctgtgccgaaagctgacccacgaccatgatcagtttcgtgcacgacacaatctctggcacagcttcttaactataaaatgtctcagcaattttcagttctgaaaagacattgagtgttccatccatcccttcttcatcttctacttctatctccctacatactcattcaaacagacatgaaaattatggaatcattagctcttatcttctacagtactcttgttttagctacgatttcagttccagcaactaactccagaatcatccatcaaaaaaacaatgccaatctgattgaagaaacttgcaagcagacaccccatcacgacctttgcatccaatacctctcctccgaccctcgcagcaccgaagcagatgtgacagggctggcacttattatggtcaacgtaatcaaaatcaaagcaaacaatgcattggacaaaatccaccaactgcttcagaaaaaccctgaacctagtcaaaaggaaccactgagttcgtgtgctgctagatacaaagcaattgtggaagctgacgtggcacaagccgttgcgtctctgcagaaaggagaccccaagttcgcagaagatggtgccaatgatgctgctattgaggccaccacttgtgagaacagcttctctgctgggaaatcgccactcaccaatcacaacaatgctatgcacgatgttgcaaccataactgcagctatagttagacaattgctctagtgacacttactccaacggaggggatgatgcaatttaattttcgtaatatcacattataattatattttcaattaacacaacataaaatcttgctctcttgttggtctcttctgtaatggaaacacaactgcttttgccacttcacaattctcatttctcactgtcccctctcctctgctttccacgtttcttattttcatttttcttctttgattcttggaaaataattgacagcgcatgggatgtgatatgcctctgtcttgtgcttctactttcttctaatgtatcatcaatttagcctttttaactttaacaaacatttgttaatcagatccttcatattatgaagatattgacatttaaacttactcttattcaggttcttcttttatcattttaacttagctttctttatatatcatatataaaattaataaataatacagaataaatccaatgaacacagttatattttattttatttataaaaaaaaaatccctataattatgatgacataattcagttaattactatcatgccttttgcaatgcagcatgtcagagcaattatttccttctcgtagcagtgtggagctcaaggaattaatggctttaacaggtgct

SEQ ID NO: 2201 - DNA, 549 bp, Glycine max
atgaaaattatggaatcattagctcttatcttctacagtactcttgttttagctacgatttcagttccagcaactaactccagaatcatccatcaaaaaaacaatgccaatctgattgaagaaacttgcaagcagacaccccatcacgacctttgcatccaatacctctcctccgaccctcgcagcaccgaagcagatgtgacagggctggcacttattatggtcaacgtaatcaaaatcaaagcaaacaatgcattggacaaaatccaccaactgcttcagaaaaaccctgaacctagtcaaaaggaaccactgagttcgtgtgctgctagatacaaagcaattgtggaagctgacgtggcacaagccgttgcgtctctgcagaaaggagaccccaagttcgcagaagatggtgccaatgatgctgctattgaggccaccacttgtgagaacagcttctctgctgggaaatcgccactcaccaatcacaacaatgctatgcacgatgttgcaaccataactgcagctatagttagacaattgctctag

SEQ ID NO: 2202 - protein, 182 aa, Glycine max
MKIMESLALIFYSTLVLATISVPATNSRIIHQKNNANLIEETCKQTPHHDLCIQYLSSDPRSTEADVTGLALIMVNVIKIKANNALDKIHQLLQKNPEPSQKEPLSSCAARYKAIVEADVAQAVASLQKGDPKFAEDGANDAAIEATTCENSFSAGKSPLTNHNNAMHDVATITAAIVRQLL

SEQ ID NO: 2203 - DNA, 20 bp, Glycine max
acaatgaaaaagtagatgtt

SEQ ID NO: 2204 - DNA, 20 bp, Glycine max
acattttaatttagtgtgaa

SEQ ID NO: 2205 - DNA, 20 bp, Glycine max
ttagtgtgaatggattttta

SEQ ID NO: 2206 - DNA, 20 bp, Glycine max
tgtgaatggatttttaagga

SEQ ID NO: 2207 - DNA, 20 bp, Glycine max
aatataattcttagcattat

SEQ ID NO: 2208 - DNA, 20 bp, Glycine max
gcaattagtttttatcaact

SEQ ID NO: 2209 - DNA, 20 bp, Glycine max
agttttaaagtatacagtaa

SEQ ID NO: 2210 - DNA, 20 bp, Glycine max
ttttttcttcttctagaaaa

SEQ ID NO: 2211 - DNA, 20 bp, Glycine max
catggtcgtgggtcagcttt

SEQ ID NO: 2212 - DNA, 20 bp, Glycine max
acgaaactgatcatggtcgt

SEQ ID NO: 2213 - DNA, 20 bp, Glycine max
cacgaaactgatcatggtcg

SEQ ID NO: 2214 - DNA, 20 bp, Glycine max
gtcgtgcacgaaactgatca

SEQ ID NO: 2215 - DNA, 20 bp, Glycine max
ttcgtgcacgacacaatctc

SEQ ID NO: 2216 - DNA, 20 bp, Glycine max
gaagatgaagaagggatgga

SEQ ID NO: 2217 - DNA, 20 bp, Glycine max
agtagaagatgaagaaggga

SEQ ID NO: 2218 - DNA, 20 bp, Glycine max
tagaagtagaagatgaagaa

SEQ ID NO: 2219 - DNA, 20 bp, Glycine max
atagaagtagaagatgaaga

SEQ ID NO: 2220 - DNA, 20 bp, Glycine max
tctgtttgaatgagtatgta

SEQ ID NO: 2221 - DNA, 20 bp, Glycine max
gtctgtttgaatgagtatgt

SEQ ID NO: 2222 - DNA, 20 bp, Glycine max
tcaaacagacatgaaaatta

SEQ ID NO: 2223 - DNA, 20 bp, Glycine max
atgattctggagttagttgc

SEQ ID NO: 2224 - DNA, 20 bp, Glycine max
gtttttttgatggatgattc

SEQ ID NO: 2225 - DNA, 20 bp, Glycine max
gattggcattgtttttttga

SEQ ID NO: 2226 - DNA, 20 bp, Glycine max
gcaagtttcttcaatcagat

SEQ ID NO: 2227 - DNA, 20 bp, Glycine max
tggatgcaaaggtcgtgatg

SEQ ID NO: 2228 - DNA, 20 bp, Glycine max
ttggatgcaaaggtcgtgat

SEQ ID NO: 2229 - DNA, 20 bp, Glycine max
attggatgcaaaggtcgtga

SEQ ID NO: 2230 - DNA, 20 bp, Glycine max
aggagaggtattggatgcaa

SEQ ID NO: 2231 - DNA, 20 bp, Glycine max
gagggtcggaggagaggtat

SEQ ID NO: 2232 - DNA, 20 bp, Glycine max
tgctgcgagggtcggaggag

SEQ ID NO: 2233 - DNA, 20 bp, Glycine max
ttcggtgctgcgagggtcgg

SEQ ID NO: 2234 - DNA, 20 bp, Glycine max
tgcttcggtgctgcgagggt

SEQ ID NO: 2235 - DNA, 20 bp, Glycine max
catctgcttcggtgctgcga

SEQ ID NO: 2236 - DNA, 20 bp, Glycine max
acatctgcttcggtgctgcg

SEQ ID NO: 2237 - DNA, 20 bp, Glycine max
cagccctgtcacatctgctt

SEQ ID NO: 2238 - DNA, 20 bp, Glycine max
agcaccgaagcagatgtgac

SEQ ID NO: 2239 - DNA, 20 bp, Glycine max
gcaccgaagcagatgtgaca

SEQ ID NO: 2240 - DNA, 20 bp, Glycine max
cgaagcagatgtgacagggc

SEQ ID NO: 2241 - DNA, 20 bp, Glycine max
gacagggctggcacttatta

SEQ ID NO: 2242 - DNA, 20 bp, Glycine max
aatcaaagcaaacaatgcat

SEQ ID NO: 2243 - DNA, 20 bp, Glycine max
ggtttttctgaagcagttgg

SEQ ID NO: 2244 - DNA, 20 bp, Glycine max
cagggtttttctgaagcagt

SEQ ID NO: 2245 - DNA, 20 bp, Glycine max
gttccttttgactaggttca

SEQ ID NO: 2246 - DNA, 20 bp, Glycine max
ggttccttttgactaggttc

SEQ ID NO: 2247 - DNA, 20 bp, Glycine max
ctcagtggttccttttgact

SEQ ID NO: 2248 - DNA, 20 bp, Glycine max
aaaccctgaacctagtcaaa

SEQ ID NO: 2249 - DNA, 20 bp, Glycine max
ctagcagcacacgaactcag

SEQ ID NO: 2250 - DNA, 20 bp, Glycine max
tgctagatacaaagcaattg

SEQ ID NO: 2251 - DNA, 20 bp, Glycine max
agcaattgtggaagctgacg

SEQ ID NO: 2252 - DNA, 20 bp, Glycine max
tcctttctgcagagacgcaa

SEQ ID NO: 2253 - DNA, 20 bp, Glycine max
gccgttgcgtctctgcagaa

SEQ ID NO: 2254 - DNA, 20 bp, Glycine max
caccatcttctgcgaacttg

SEQ ID NO: 2255 - DNA, 20 bp, Glycine max
gcaccatcttctgcgaactt

SEQ ID NO: 2256 - DNA, 20 bp, Glycine max
ggcaccatcttctgcgaact

SEQ ID NO: 2257 - DNA, 20 bp, Glycine max
gaccccaagttcgcagaaga

SEQ ID NO: 2258 - DNA, 20 bp, Glycine max
ggcctcaatagcagcatcat

SEQ ID NO: 2259 - DNA, 20 bp, Glycine max
tgccaatgatgctgctattg

SEQ ID NO: 2260 - DNA, 20 bp, Glycine max
gaagctgttctcacaagtgg

SEQ ID NO: 2261 - DNA, 20 bp, Glycine max
agagaagctgttctcacaag

SEQ ID NO: 2262 - DNA, 20 bp, Glycine max
tgtgagaacagcttctctgc

SEQ ID NO: 2263 - DNA, 20 bp, Glycine max
gtgagaacagcttctctgct

SEQ ID NO: 2264 - DNA, 20 bp, Glycine max
gcattgttgtgattggtgag

SEQ ID NO: 2265 - DNA, 20 bp, Glycine max
gtgcatagcattgttgtgat

SEQ ID NO: 2266 - DNA, 20 bp, Glycine max
tctaactatagctgcagtta

SEQ ID NO: 2267 - DNA, 20 bp, Glycine max
tctagtgacacttactccaa

SEQ ID NO: 2268 - DNA, 20 bp, Glycine max
agtgacacttactccaacgg

SEQ ID NO: 2269 - DNA, 20 bp, Glycine max
gtgacacttactccaacgga

SEQ ID NO: 2270 - DNA, 20 bp, Glycine max
tgacacttactccaacggag

SEQ ID NO: 2271 - DNA, 20 bp, Glycine max
aattgcatcatcccctccgt

SEQ ID NO: 2272 - DNA, 20 bp, Glycine max
ataaaatcttgctctcttgt

SEQ ID NO: 2273 - DNA, 20 bp, Glycine max
cttgttggtctcttctgtaa

SEQ ID NO: 2274 - DNA, 20 bp, Glycine max
gagaaatgagaattgtgaag

SEQ ID NO: 2275 - DNA, 20 bp, Glycine max
acgtggaaagcagaggagag

SEQ ID NO: 2276 - DNA, 20 bp, Glycine max
aacgtggaaagcagaggaga

SEQ ID NO: 2277 - DNA, 20 bp, Glycine max
aaacgtggaaagcagaggag

SEQ ID NO: 2278 - DNA, 20 bp, Glycine max
ataagaaacgtggaaagcag

SEQ ID NO: 2279 - DNA, 20 bp, Glycine max
aaaaatgaaaataagaaacg

SEQ ID NO: 2280 - DNA, 20 bp, Glycine max
catttttcttctttgattct

SEQ ID NO: 2281 - DNA, 20 bp, Glycine max
ggaaaataattgacagcgca

SEQ ID NO: 2282 - DNA, 20 bp, Glycine max
gaaaataattgacagcgcat

SEQ ID NO: 2283 - DNA, 20 bp, Glycine max
aaagtagaagcacaagacag

SEQ ID NO: 2284 - DNA, 20 bp, Glycine max
aatgtttgttaaagttaaaa

SEQ ID NO: 2285 - DNA, 20 bp, Glycine max
tcaatatcttcataatatga

SEQ ID NO: 2286 - DNA, 20 bp, Glycine max
atttaaacttactcttattc

SEQ ID NO: 2287 - DNA, 20 bp, Glycine max
taaaatataactgtgttcat

SEQ ID NO: 2288 - DNA, 20 bp, Glycine max
attatgtcatcataattata

SEQ ID NO: 2289 - DNA, 20 bp, Glycine max
aattatgtcatcataattat

SEQ ID NO: 2290 - DNA, 20 bp, Glycine max
ctgacatgctgcattgcaaa

SEQ ID NO: 2291 - DNA, 20 bp, Glycine max
agctccacactgctacgaga

SEQ ID NO: 2292 - DNA, 20 bp, Glycine max
atttccttctcgtagcagtg

SEQ ID NO: 2293 - DNA, 20 bp, Glycine max
tcgtagcagtgtggagctca

SEQ ID NO: 2294 - DNA, 20 bp, Glycine max
tgtggagctcaaggaattaa

SEQ ID NO: 2295 - DNA, 20 bp, Glycine max
aaggaattaatggctttaac

SEQ ID NO: 2296 - DNA, 5225 bp, Glycine max
ggcggaagcgttgaccggtctttctgactctcttcacaataaaatccaatctcagcgcagcacttcacatcaaagcgcgtggtgagggcagaaatggcggcggctacggcaatttctcagcttggctgcttctccgccgtccaccgcagctcacacctccggcggcgctcgcttctattcccttgccctcgctccaaggtctttatcctctttctgattttgaaatcatattttgtcaccgtctcttgtaacttatattagggttcgtgtttagccacaattgtctgcatcaagcacgccaatgtagaagttactacatagatctaaagcgatgtttcctaaatcattcgttgccaagggaagtttgaagtaatagtgttaaaaaaaactgaatttttgcttctagaactttaatttccaatgagaatttgtgttagaatcacaattgttaggttggaattttgtttagtttatggattggctcgctgaatacatttattgcgtgtttgaattagcttgttttgaagaaaatatatataattgagatttattagcggcttcttgatgtattgttttcatgattagttcttaatcagtctatcccaaacatgattcggtgttgaaggtaatgccttttgttcatagagtttgttgtctgattttgttggttttagtcaaaggattttgtatgacttggtgttacttctgaaccagattactgaaaaaagagcagcactaagtcattaacatatatccataaaagaaagctgtttgcctgttgttaccataggcaatatatttttaatcaccggaaattttgtgagcagtctctttcaaatgatgtggtttttttttttttttttaatatggatctatgacaattattgctgtatgtgtgtatgtgtgctccatcatgtctatcatccatgttcctcttgtgacttctttccttttgggtatcacactttcctaatactgtgtactttgttgctgttaaactcacataatctacatctttcgaatttggcatccatgactgcttatatttagttcctggttagataaatttctccataagcacccataggagaagaaaataagaaggaaagaaaaaaagcttctctcataaacttaaattagcttacgcataagttaagatcagcttttagagaagctaaattatatagcttctacaaattagcttatgcataagctaattttaacttaaacttatagaataagcttatttcattttttcttctttcttctcctataatttcttatagagaaattatccaaacaaggccataaacatgtttctctacaagtactggatagaatgctttattgatcatatatgcttgtatttataattttatatgcaactctagtgagaatacaaaacttataagtgcatagcagagtgctggaagtgcacatgatcaagcattcgagttatagccttaatgatgatagattcgcaggtttctccacatttaggggaaagtcatattaagtctatatgcttgcacatatctctcgtttgatattgcagggcatagtgctagaaaatatcattaggcttgaataacagcataaataatgttacataaaagtttgctagagcaattatttgatattgatactaaacaggaagcatgtctcatttagttatcagttgttatgagtctggagaggcatgacacagatactgctgggtctgataccaaaaatacactaagttatgcagctgatgtgtcaaagctacatgttgaagaaaaaaagcactcatattctacaaaagatggccatgatactgaaaaattaggttttggagaggcaacacaggaaagtgttcatcaaccgaaaaggactgcaaagattcatgacttctgtttaggcatcccctttggtaagtgtttccttgttagttaatttgcatgttaggcaactttattgttaagttataataatccattccacttacagtgtgtttggttggatggaaatggagggggagggtagttcttttttttacgttatttaattcagaaacttggaggggaggggattagaaatcgttgagcttgaatgcctccttgcctgtgtttgtttccccttcaaattagggggggtttggatgggagggaaagtggtttataattttttgactgtgtagactaaattgtctgaaatttgtttacctctttattaggttggatctagatagagagataaaatataagtgaagggggatagaaaacaatcgtaccttttcaaatttcaaagagtgtagcaaattaagtgaaggatctatcaataataagtgaattgatttatgttaggacaccactcacaatgattgactggcctgctctcaacaatgcccaagtctaactaactagttccaactcatcattactcactaactcctgctaacctgcttcctgatctctctttttcctgaccaactcttctgttgtctactccataactgaaccttgtgtcctaacatggccctttcctggagcttcagccttgtccttaaggatgaaagaaggaaactggctacatggcacaaattcatcctcccacattgtgcttctattaatttccccttccacttttccagcctctgatgaatcttctctctcctaaataacttgtctgctaaccatcaccattacatattctggctccccttgatcttgtaactcaagttccagcccctttggcaggttgttaggcacaattttaaggaaacctaatttcctacctcaaaacacctgttcctttctttgtcgatccacatactcattctgttgtgcctgtataaggttctgtctcaactgtgattggcttcatctctgtccttcatatcttgagctagaggctcaactctggttttgctagataagaggcattccaaggtaggaaggaggcttcctcccgtagacaactgcaaaaggcattttacctgtggctgcttgtaaagatttgttgtaccatagctgagcccacatcacccattgaggtaaagcaactcaagttggtttccaaacaccttttcaagactttggtttgactgtctgattcaaggtgatacgaaaagctcatcctgagtaacgtccctcgcaacttaaacaattctttccaagaacggctaaagaaaaaagaatctcagtcactaaccactgatttgggaataccatgcagccttatcacatcttgaaaatagctcagtgactgtcttggctatacaagggtgcttaagcaacaaaatagctatatttaatagtctatcatcaacacaaatagaatggcctcatagcctcttaggaaaacccataatgaaatctaagtgtcttcccaaatctgtttatcaatctctagaggctgttagagtccagcatgtggcttcatatttgttccttcaatagacatcacaggacttcacaaagtcctggactcttctcttagtcaatccagcatacaaggcaacaagacgggtttggctctcccagtcctcgctccaaccaagaactggactgtttgaattgactgaaacaatttagcctttcgttttcatctagaattaacaatttaaattgcttattagaagcttagaatgggtttgtagagggtgtaatttctcaccacaacgaaagcaaaggatttttttcactcaatgaactcagggtaaaaagggtgatgaaacccttgcatcttctctgttgagactctccaatgttgggacaccagtcacaacacaaagcagaaagagagagaagatccaagattagaagaaaattgtgttattcactgtaagagcttggacagaaaaccagagcttaactcagttacatctctccctcaaaaattacaaatcccccatgtctcctacatgcctgcagattcttttacatttaactaactggtcatctctcaacagtgccaagcaacttactaacacttgctaattaactagcttcttgatctctttttcttgctcctgtagtatcctttccagacctttggccctctgttattgtccactaactgatctgtacctgaactttgggtccaaacaattgacctcagaaaaggttttatggagtctagtgttatacagattatggcttattaaactttttacatttacctattagtttttaaaatggaacattgtgctgaacagggtatagtatttgtgggtgacctcttgtttgagactcatgacatcaataatatggaaatgtggtacattattttagtacagagagaaaatttatacagtattctattagggaattatcccccctccccattaaagatgttatatctcatctttatcttttgttgtaggtggatttgttttaactggagggattattggattcctattttcacggagtcctgcaacactaggcagtggtgtgctctttgggggtgctttactattccttagcacctttagcatgaaggtttggaggcaaggaaaatcgagtttaccatttattctaggacaagcaggtatatgatttaagcagcattaatatggcattggtcttggaataagaaaaaaaagagaagaaacataagaagctgcagcataatcttattaggataagtgttatgtactctcttgacttgtttctttattttacagctttggcaggggttcttatctggaagaactttcaaagctactcattggtagtacatctatttttggcaaaaaactgttcttatgttgtgtctcatttaattgttatacttatttgcatttctggatgcaggcaaagaaaatatttccaacgggcattagtgctattataaggtatctcaatccattgcttttatcctaattaattatactttggtctttgaaattgataattgttcttttagccccttgggtgttagattgtcctaattttggattgatcgctttatgcttgcgggaaatttttgtttgcagttctgcaatgctctgcttttatttatatgtgcttatctctggaggaaatcccccacctaagaaattgaagccatctgccagcactgcatgatgagatagtcaaggttatgctagcctgtagaatatggggatataatatcttatttttctgtgaattgaaataagttttggatgaaaatctgataatttgtttctatagtttttcttatttataaatcataatctttattttcagtccattcta

SEQ ID NO: 2297 - DNA, 576 bp, Glycine max
atgagtctggagaggcatgacacagatactgctgggtctgataccaaaaatacactaagttatgcagctgatgtgtcaaagctacatgttgaagaaaaaaagcactcatattctacaaaagatggccatgatactgaaaaattaggttttggagaggcaacacaggaaagtgttcatcaaccgaaaaggactgcaaagattcatgacttctgtttaggcatcccctttggtggatttgttttaactggagggattattggattcctattttcacggagtcctgcaacactaggcagtggtgtgctctttgggggtgctttactattccttagcacctttagcatgaaggtttggaggcaaggaaaatcgagtttaccatttattctaggacaagcagctttggcaggggttcttatctggaagaactttcaaagctactcattggcaaagaaaatatttccaacgggcattagtgctattataagttctgcaatgctctgcttttatttatatgtgcttatctctggaggaaatcccccacctaagaaattgaagccatctgccagcactgcatga

SEQ ID NO: 2298 - protein, 191 aa, Glycine max
MSLERHDTDTAGSDTKNTLSYAADVSKLHVEEKKHSYSTKDGHDTEKLGFGEATQESVHQPKRTAKIHDFCLGIPFGGFVLTGGIIGFLFSRSPATLGSGVLFGGALLFLSTFSMKVWRQGKSSLPFILGQAALAGVLIWKNFQSYSLAKKIFPTGISAIISSAMLCFYLYVLISGGNPPPKKLKPSASTA

SEQ ID NO: 2299 - DNA, 20 bp, Glycine max
tcgcaggtttctccacattt

SEQ ID NO: 2300 - DNA, 20 bp, Glycine max
cgcaggtttctccacattta

SEQ ID NO: 2301 - DNA, 20 bp, Glycine max
atatgactttcccctaaatg

SEQ ID NO: 2302 - DNA, 20 bp, Glycine max
gcaggtttctccacatttag

SEQ ID NO: 2303 - DNA, 20 bp, Glycine max
tatctctcgtttgatattgc

SEQ ID NO: 2304 - DNA, 20 bp, Glycine max
atctctcgtttgatattgca

SEQ ID NO: 2305 - DNA, 20 bp, Glycine max
tagtgctagaaaatatcatt

SEQ ID NO: 2306 - DNA, 20 bp, Glycine max
atttgatattgatactaaac

SEQ ID NO: 2307 - DNA, 20 bp, Glycine max
gttatcagttgttatgagtc

SEQ ID NO: 2308 - DNA, 20 bp, Glycine max
cagttgttatgagtctggag

SEQ ID NO: 2309 - DNA, 20 bp, Glycine max
aggcatgacacagatactgc

SEQ ID NO: 2310 - DNA, 20 bp, Glycine max
ggcatgacacagatactgct

SEQ ID NO: 2311 - DNA, 20 bp, Glycine max
tgcataacttagtgtatttt

SEQ ID NO: 2312 - DNA, 20 bp, Glycine max
cactcatattctacaaaaga

SEQ ID NO: 2313 - DNA, 20 bp, Glycine max
aacctaatttttcagtatca

SEQ ID NO: 2314 - DNA, 20 bp, Glycine max
ggccatgatactgaaaaatt

SEQ ID NO: 2315 - DNA, 20 bp, Glycine max
gatactgaaaaattaggttt

SEQ ID NO: 2316 - DNA, 20 bp, Glycine max
tgaaaaattaggttttggag

SEQ ID NO: 2317 - DNA, 20 bp, Glycine max
aggttttggagaggcaacac

SEQ ID NO: 2318 - DNA, 20 bp, Glycine max
aaagtgttcatcaaccgaaa

SEQ ID NO: 2319 - DNA, 20 bp, Glycine max
tgaatctttgcagtcctttt

SEQ ID NO: 2320 - DNA, 20 bp, Glycine max
aagattcatgacttctgttt

SEQ ID NO: 2321 - DNA, 20 bp, Glycine max
ttctgtttaggcatcccctt

SEQ ID NO: 2322 - DNA, 20 bp, Glycine max
caaggaaacacttaccaaag

SEQ ID NO: 2323 - DNA, 20 bp, Glycine max
acaaggaaacacttaccaaa

SEQ ID NO: 2324 - DNA, 20 bp, Glycine max
aacaaggaaacacttaccaa

SEQ ID NO: 2325 - DNA, 20 bp, Glycine max
aacatgcaaattaactaaca

SEQ ID NO: 2326 - DNA, 20 bp, Glycine max
tgttagttaatttgcatgtt

SEQ ID NO: 2327 - DNA, 20 bp, Glycine max
caaacacactgtaagtggaa

SEQ ID NO: 2328 - DNA, 20 bp, Glycine max
ccaaccaaacacactgtaag

SEQ ID NO: 2329 - DNA, 20 bp, Glycine max
cattccacttacagtgtgtt

SEQ ID NO: 2330 - DNA, 20 bp, Glycine max
ccacttacagtgtgtttggt

SEQ ID NO: 2331 - DNA, 20 bp, Glycine max
ttacagtgtgtttggttgga

SEQ ID NO: 2332 - DNA, 20 bp, Glycine max
tgtgtttggttggatggaaa

SEQ ID NO: 2333 - DNA, 20 bp, Glycine max
gtttggttggatggaaatgg

SEQ ID NO: 2334 - DNA, 20 bp, Glycine max
tttggttggatggaaatgga

SEQ ID NO: 2335 - DNA, 20 bp, Glycine max
ttggttggatggaaatggag

SEQ ID NO: 2336 - DNA, 20 bp, Glycine max
tggttggatggaaatggagg

SEQ ID NO: 2337 - DNA, 20 bp, Glycine max
ttggatggaaatggaggggg

SEQ ID NO: 2338 - DNA, 20 bp, Glycine max
tggatggaaatggaggggga

SEQ ID NO: 2339 - DNA, 20 bp, Glycine max
cgttatttaattcagaaact

SEQ ID NO: 2340 - DNA, 20 bp, Glycine max
tatttaattcagaaacttgg

SEQ ID NO: 2341 - DNA, 20 bp, Glycine max
atttaattcagaaacttgga

SEQ ID NO: 2342 - DNA, 20 bp, Glycine max
tttaattcagaaacttggag

SEQ ID NO: 2343 - DNA, 20 bp, Glycine max
aattcagaaacttggagggg

SEQ ID NO: 2344 - DNA, 20 bp, Glycine max
attcagaaacttggagggga

SEQ ID NO: 2345 - DNA, 20 bp, Glycine max
ttcagaaacttggaggggag

SEQ ID NO: 2346 - DNA, 20 bp, Glycine max
ggaaacaaacacaggcaagg

SEQ ID NO: 2347 - DNA, 20 bp, Glycine max
aggggaaacaaacacaggca

SEQ ID NO: 2348 - DNA, 20 bp, Glycine max
tttgaaggggaaacaaacac

SEQ ID NO: 2349 - DNA, 20 bp, Glycine max
aaaccccccctaatttgaag

SEQ ID NO: 2350 - DNA, 20 bp, Glycine max
caaaccccccctaatttgaa

SEQ ID NO: 2351 - DNA, 20 bp, Glycine max
ccaaaccccccctaatttga

SEQ ID NO: 2352 - DNA, 20 bp, Glycine max
gtttgtttccccttcaaatt

SEQ ID NO: 2353 - DNA, 20 bp, Glycine max
tttgtttccccttcaaatta

SEQ ID NO: 2354 - DNA, 20 bp, Glycine max
ttgtttccccttcaaattag

SEQ ID NO: 2355 - DNA, 20 bp, Glycine max
tgtttccccttcaaattagg

SEQ ID NO: 2356 - DNA, 20 bp, Glycine max
gtttccccttcaaattaggg

SEQ ID NO: 2357 - DNA, 20 bp, Glycine max
tttccccttcaaattagggg

SEQ ID NO: 2358 - DNA, 20 bp, Glycine max
ccttcaaattagggggggtt

SEQ ID NO: 2359 - DNA, 20 bp, Glycine max
caaattagggggggtttgga

SEQ ID NO: 2360 - DNA, 20 bp, Glycine max
aaattagggggggtttggat

SEQ ID NO: 2361 - DNA, 20 bp, Glycine max
ttagggggggtttggatggg

SEQ ID NO: 2362 - DNA, 20 bp, Glycine max
tagggggggtttggatggga

SEQ ID NO: 2363 - DNA, 20 bp, Glycine max
ggtttggatgggagggaaag

SEQ ID NO: 2364 - DNA, 20 bp, Glycine max
ctagatccaacctaataaag

SEQ ID NO: 2365 - DNA, 20 bp, Glycine max
aatttgtttacctctttatt

SEQ ID NO: 2366 - DNA, 20 bp, Glycine max
tgtttacctctttattaggt

SEQ ID NO: 2367 - DNA, 20 bp, Glycine max
gagagataaaatataagtga

SEQ ID NO: 2368 - DNA, 20 bp, Glycine max
agagataaaatataagtgaa

SEQ ID NO: 2369 - DNA, 20 bp, Glycine max
gagataaaatataagtgaag

SEQ ID NO: 2370 - DNA, 20 bp, Glycine max
agataaaatataagtgaagg

SEQ ID NO: 2371 - DNA, 20 bp, Glycine max
acactctttgaaatttgaaa

SEQ ID NO: 2372 - DNA, 20 bp, Glycine max
gagtgtagcaaattaagtga

SEQ ID NO: 2373 - DNA, 20 bp, Glycine max
taagtgaattgatttatgtt

SEQ ID NO: 2374 - DNA, 20 bp, Glycine max
ggccagtcaatcattgtgag

SEQ ID NO: 2375 - DNA, 20 bp, Glycine max
caccactcacaatgattgac

SEQ ID NO: 2376 - DNA, 20 bp, Glycine max
acttgggcattgttgagagc

SEQ ID NO: 2377 - DNA, 20 bp, Glycine max
ggaactagttagttagactt

SEQ ID NO: 2378 - DNA, 20 bp, Glycine max
tggaactagttagttagact

SEQ ID NO: 2379 - DNA, 20 bp, Glycine max
gttagtgagtaatgatgagt

SEQ ID NO: 2380 - DNA, 20 bp, Glycine max
agatcaggaagcaggttagc

SEQ ID NO: 2381 - DNA, 20 bp, Glycine max
aaaaagagagatcaggaagc

SEQ ID NO: 2382 - DNA, 20 bp, Glycine max
ggtcaggaaaaagagagatc

SEQ ID NO: 2383 - DNA, 20 bp, Glycine max
agacaacagaagagttggtc

SEQ ID NO: 2384 - DNA, 20 bp, Glycine max
ggagtagacaacagaagagt

SEQ ID NO: 2385 - DNA, 20 bp, Glycine max
taggacacaaggttcagtta

SEQ ID NO: 2386 - DNA, 20 bp, Glycine max
aagggccatgttaggacaca

SEQ ID NO: 2387 - DNA, 20 bp, Glycine max
ctgaaccttgtgtcctaaca

SEQ ID NO: 2388 - DNA, 20 bp, Glycine max
ctccaggaaagggccatgtt

SEQ ID NO: 2389 - DNA, 20 bp, Glycine max
gtcctaacatggccctttcc

SEQ ID NO: 2390 - DNA, 20 bp, Glycine max
aaggctgaagctccaggaaa

SEQ ID NO: 2391 - DNA, 20 bp, Glycine max
caaggctgaagctccaggaa

SEQ ID NO: 2392 - DNA, 20 bp, Glycine max
aaggacaaggctgaagctcc

SEQ ID NO: 2393 - DNA, 20 bp, Glycine max
ttctttcatccttaaggaca

SEQ ID NO: 2394 - DNA, 20 bp, Glycine max
gagcttcagccttgtcctta

SEQ ID NO: 2395 - DNA, 20 bp, Glycine max
gtttccttctttcatcctta

SEQ ID NO: 2396 - DNA, 20 bp, Glycine max
ttgtccttaaggatgaaaga

SEQ ID NO: 2397 - DNA, 20 bp, Glycine max
taaggatgaaagaaggaaac

SEQ ID NO: 2398 - DNA, 20 bp, Glycine max
aaagaaggaaactggctaca

SEQ ID NO: 2399 - DNA, 20 bp, Glycine max
taatagaagcacaatgtggg

SEQ ID NO: 2400 - DNA, 20 bp, Glycine max
aattaatagaagcacaatgt

SEQ ID NO: 2401 - DNA, 20 bp, Glycine max
aaattaatagaagcacaatg

SEQ ID NO: 2402 - DNA, 20 bp, Glycine max
agaggctggaaaagtggaag

SEQ ID NO: 2403 - DNA, 20 bp, Glycine max
cagaggctggaaaagtggaa

SEQ ID NO: 2404 - DNA, 20 bp, Glycine max
tcagaggctggaaaagtgga

SEQ ID NO: 2405 - DNA, 20 bp, Glycine max
ttcatcagaggctggaaaag

SEQ ID NO: 2406 - DNA, 20 bp, Glycine max
agagaagattcatcagaggc

SEQ ID NO: 2407 - DNA, 20 bp, Glycine max
ggagagagaagattcatcag

SEQ ID NO: 2408 - DNA, 20 bp, Glycine max
ggttagcagacaagttattt

SEQ ID NO: 2409 - DNA, 20 bp, Glycine max
gccagaatatgtaatggtga

SEQ ID NO: 2410 - DNA, 20 bp, Glycine max
aggggagccagaatatgtaa

SEQ ID NO: 2411 - DNA, 20 bp, Glycine max
accatcaccattacatattc

SEQ ID NO: 2412 - DNA, 20 bp, Glycine max
acttgagttacaagatcaag

SEQ ID NO: 2413 - DNA, 20 bp, Glycine max
aacttgagttacaagatcaa

SEQ ID NO: 2414 - DNA, 20 bp, Glycine max
gaacttgagttacaagatca

SEQ ID NO: 2415 - DNA, 20 bp, Glycine max
taacaacctgccaaaggggc

SEQ ID NO: 2416 - DNA, 20 bp, Glycine max
aactcaagttccagcccctt

SEQ ID NO: 2417 - DNA, 20 bp, Glycine max
tgcctaacaacctgccaaag

SEQ ID NO: 2418 - DNA, 20 bp, Glycine max
caagttccagcccctttggc

SEQ ID NO: 2419 - DNA, 20 bp, Glycine max
gtgcctaacaacctgccaaa

SEQ ID NO: 2420 - DNA, 20 bp, Glycine max
tgtgcctaacaacctgccaa

SEQ ID NO: 2421 - DNA, 20 bp, Glycine max
agcccctttggcaggttgtt

SEQ ID NO: 2422 - DNA, 20 bp, Glycine max
ggttgttaggcacaatttta

SEQ ID NO: 2423 - DNA, 20 bp, Glycine max
gtgttttgaggtaggaaatt

SEQ ID NO: 2424 - DNA, 20 bp, Glycine max
aggaacaggtgttttgaggt

SEQ ID NO: 2425 - DNA, 20 bp, Glycine max
agaaaggaacaggtgttttg

SEQ ID NO: 2426 - DNA, 20 bp, Glycine max
ggatcgacaaagaaaggaac

SEQ ID NO: 2427 - DNA, 20 bp, Glycine max
gtatgtggatcgacaaagaa

SEQ ID NO: 2428 - DNA, 20 bp, Glycine max
ggcacaacagaatgagtatg

SEQ ID NO: 2429 - DNA, 20 bp, Glycine max
cattctgttgtgcctgtata

SEQ ID NO: 2430 - DNA, 20 bp, Glycine max
gttgagacagaaccttatac

SEQ ID NO: 2431 - DNA, 20 bp, Glycine max
ggttctgtctcaactgtgat

SEQ ID NO: 2432 - DNA, 20 bp, Glycine max
gcctctagctcaagatatga

SEQ ID NO: 2433 - DNA, 20 bp, Glycine max
tccttcatatcttgagctag

SEQ ID NO: 2434 - DNA, 20 bp, Glycine max
ttgagctagaggctcaactc

SEQ ID NO: 2435 - DNA, 20 bp, Glycine max
ctctggttttgctagataag

SEQ ID NO: 2436 - DNA, 20 bp, Glycine max
gctagataagaggcattcca

SEQ ID NO: 2437 - DNA, 20 bp, Glycine max
gataagaggcattccaaggt

SEQ ID NO: 2438 - DNA, 20 bp, Glycine max
aggaagcctccttcctacct

SEQ ID NO: 2439 - DNA, 20 bp, Glycine max
agaggcattccaaggtagga

SEQ ID NO: 2440 - DNA, 20 bp, Glycine max
ggcattccaaggtaggaagg

SEQ ID NO: 2441 - DNA, 20 bp, Glycine max
cttttgcagttgtctacggg

SEQ ID NO: 2442 - DNA, 20 bp, Glycine max
tgccttttgcagttgtctac

SEQ ID NO: 2443 - DNA, 20 bp, Glycine max
atgccttttgcagttgtcta

SEQ ID NO: 2444 - DNA, 20 bp, Glycine max
ctcccgtagacaactgcaaa

SEQ ID NO: 2445 - DNA, 20 bp, Glycine max
tgcaaaaggcattttacctg

SEQ ID NO: 2446 - DNA, 20 bp, Glycine max
aaatctttacaagcagccac

SEQ ID NO: 2447 - DNA, 20 bp, Glycine max
gggtgatgtgggctcagcta

SEQ ID NO: 2448 - DNA, 20 bp, Glycine max
tttacctcaatgggtgatgt

SEQ ID NO: 2449 - DNA, 20 bp, Glycine max
ctttacctcaatgggtgatg

SEQ ID NO: 2450 - DNA, 20 bp, Glycine max
tgagcccacatcacccattg

SEQ ID NO: 2451 - DNA, 20 bp, Glycine max
ttgagttgctttacctcaat

SEQ ID NO: 2452 - DNA, 20 bp, Glycine max
cttgagttgctttacctcaa

SEQ ID NO: 2453 - DNA, 20 bp, Glycine max
tgaggtaaagcaactcaagt

SEQ ID NO: 2454 - DNA, 20 bp, Glycine max
caaagtcttgaaaaggtgtt

SEQ ID NO: 2455 - DNA, 20 bp, Glycine max
gtcaaaccaaagtcttgaaa

SEQ ID NO: 2456 - DNA, 20 bp, Glycine max
caaacaccttttcaagactt

SEQ ID NO: 2457 - DNA, 20 bp, Glycine max
tggtttgactgtctgattca

SEQ ID NO: 2458 - DNA, 20 bp, Glycine max
agttgcgagggacgttactc

SEQ ID NO: 2459 - DNA, 20 bp, Glycine max
aagaattgtttaagttgcga

SEQ ID NO: 2460 - DNA, 20 bp, Glycine max
aaagaattgtttaagttgcg

SEQ ID NO: 2461 - DNA, 20 bp, Glycine max
taaacaattctttccaagaa

SEQ ID NO: 2462 - DNA, 20 bp, Glycine max
cttttttctttagccgttct

SEQ ID NO: 2463 - DNA, 20 bp, Glycine max
tcagtcactaaccactgatt

SEQ ID NO: 2464 - DNA, 20 bp, Glycine max
gcatggtattcccaaatcag

SEQ ID NO: 2465 - DNA, 20 bp, Glycine max
cagtcactaaccactgattt

SEQ ID NO: 2466 - DNA, 20 bp, Glycine max
caagatgtgataaggctgca

SEQ ID NO: 2467 - DNA, 20 bp, Glycine max
gctattttcaagatgtgata

SEQ ID NO: 2468 - DNA, 20 bp, Glycine max
aaatagctcagtgactgtct

SEQ ID NO: 2469 - DNA, 20 bp, Glycine max
gtgactgtcttggctataca

SEQ ID NO: 2470 - DNA, 20 bp, Glycine max
tgactgtcttggctatacaa

SEQ ID NO: 2471 - DNA, 20 bp, Glycine max
tatcatcaacacaaatagaa

SEQ ID NO: 2472 - DNA, 20 bp, Glycine max
ggttttcctaagaggctatg

SEQ ID NO: 2473 - DNA, 20 bp, Glycine max
gaatggcctcatagcctctt

SEQ ID NO: 2474 - DNA, 20 bp, Glycine max
tcattatgggttttcctaag

SEQ ID NO: 2475 - DNA, 20 bp, Glycine max
agacacttagatttcattat

SEQ ID NO: 2476 - DNA, 20 bp, Glycine max
aagacacttagatttcatta

SEQ ID NO: 2477 - DNA, 20 bp, Glycine max
agagattgataaacagattt

SEQ ID NO: 2478 - DNA, 20 bp, Glycine max
tagagattgataaacagatt

SEQ ID NO: 2479 - DNA, 20 bp, Glycine max
atctgtttatcaatctctag

SEQ ID NO: 2480 - DNA, 20 bp, Glycine max
ggctgttagagtccagcatg

SEQ ID NO: 2481 - DNA, 20 bp, Glycine max
acaaatatgaagccacatgc

SEQ ID NO: 2482 - DNA, 20 bp, Glycine max
agtcctgtgatgtctattga

SEQ ID NO: 2483 - DNA, 20 bp, Glycine max
gttccttcaatagacatcac

SEQ ID NO: 2484 - DNA, 20 bp, Glycine max
cacaggacttcacaaagtcc

SEQ ID NO: 2485 - DNA, 20 bp, Glycine max
attgactaagagaagagtcc

SEQ ID NO: 2486 - DNA, 20 bp, Glycine max
cgtcttgttgccttgtatgc

SEQ ID NO: 2487 - DNA, 20 bp, Glycine max
cttagtcaatccagcataca

SEQ ID NO: 2488 - DNA, 20 bp, Glycine max
cagcatacaaggcaacaaga

SEQ ID NO: 2489 - DNA, 20 bp, Glycine max
agcatacaaggcaacaagac

SEQ ID NO: 2490 - DNA, 20 bp, Glycine max
acaaggcaacaagacgggtt

SEQ ID NO: 2491 - DNA, 20 bp, Glycine max
tcttggttggagcgaggact

SEQ ID NO: 2492 - DNA, 20 bp, Glycine max
ttcttggttggagcgaggac

SEQ ID NO: 2493 - DNA, 20 bp, Glycine max
tccagttcttggttggagcg

SEQ ID NO: 2494 - DNA, 20 bp, Glycine max
caaacagtccagttcttggt

SEQ ID NO: 2495 - DNA, 20 bp, Glycine max
tcctcgctccaaccaagaac

SEQ ID NO: 2496 - DNA, 20 bp, Glycine max
aattcaaacagtccagttct

SEQ ID NO: 2497 - DNA, 20 bp, Glycine max
taattctagatgaaaacgaa

SEQ ID NO: 2498 - DNA, 20 bp, Glycine max
tgcttattagaagcttagaa

SEQ ID NO: 2499 - DNA, 20 bp, Glycine max
gcttattagaagcttagaat

SEQ ID NO: 2500 - DNA, 20 bp, Glycine max
agcttagaatgggtttgtag

SEQ ID NO: 2501 - DNA, 20 bp, Glycine max
gcttagaatgggtttgtaga

SEQ ID NO: 2502 - DNA, 20 bp, Glycine max
aaaatcctttgctttcgttg

SEQ ID NO: 2503 - DNA, 20 bp, Glycine max
tctcaccacaacgaaagcaa

SEQ ID NO: 2504 - DNA, 20 bp, Glycine max
ttttttcactcaatgaactc

SEQ ID NO: 2505 - DNA, 20 bp, Glycine max
tttttcactcaatgaactca

SEQ ID NO: 2506 - DNA, 20 bp, Glycine max
tcaatgaactcagggtaaaa

SEQ ID NO: 2507 - DNA, 20 bp, Glycine max
caatgaactcagggtaaaaa

SEQ ID NO: 2508 - DNA, 20 bp, Glycine max
tctcaacagagaagatgcaa

SEQ ID NO: 2509 - DNA, 20 bp, Glycine max
gtctcaacagagaagatgca

SEQ ID NO: 2510 - DNA, 20 bp, Glycine max
ctgttgagactctccaatgt

SEQ ID NO: 2511 - DNA, 20 bp, Glycine max
tgttgagactctccaatgtt

SEQ ID NO: 2512 - DNA, 20 bp, Glycine max
tgtgactggtgtcccaacat

SEQ ID NO: 2513 - DNA, 20 bp, Glycine max
tttctgctttgtgttgtgac

SEQ ID NO: 2514 - DNA, 20 bp, Glycine max
acacaattttcttctaatct

SEQ ID NO: 2515 - DNA, 20 bp, Glycine max
tgttattcactgtaagagct

SEQ ID NO: 2516 - DNA, 20 bp, Glycine max
gatgtaactgagttaagctc

SEQ ID NO: 2517 - DNA, 20 bp, Glycine max
gggggatttgtaatttttga

SEQ ID NO: 2518 - DNA, 20 bp, Glycine max
tgggggatttgtaatttttg

SEQ ID NO: 2519 - DNA, 20 bp, Glycine max
caggcatgtaggagacatgg

SEQ ID NO: 2520 - DNA, 20 bp, Glycine max
gcaggcatgtaggagacatg

SEQ ID NO: 2521 - DNA, 20 bp, Glycine max
tgcaggcatgtaggagacat

SEQ ID NO: 2522 - DNA, 20 bp, Glycine max
ctgcaggcatgtaggagaca

SEQ ID NO: 2523 - DNA, 20 bp, Glycine max
aaaagaatctgcaggcatgt

SEQ ID NO: 2524 - DNA, 20 bp, Glycine max
ttaaatgtaaaagaatctgc

SEQ ID NO: 2525 - DNA, 20 bp, Glycine max
ttcttttacatttaactaac

SEQ ID NO: 2526 - DNA, 20 bp, Glycine max
gcaagtgttagtaagttgct

SEQ ID NO: 2527 - DNA, 20 bp, Glycine max
aggtctggaaaggatactac

SEQ ID NO: 2528 - DNA, 20 bp, Glycine max
agagggccaaaggtctggaa

SEQ ID NO: 2529 - DNA, 20 bp, Glycine max
tagtatcctttccagacctt

SEQ ID NO: 2530 - DNA, 20 bp, Glycine max
ataacagagggccaaaggtc

SEQ ID NO: 2531 - DNA, 20 bp, Glycine max
ggacaataacagagggccaa

SEQ ID NO: 2532 - DNA, 20 bp, Glycine max
agttagtggacaataacaga

SEQ ID NO: 2533 - DNA, 20 bp, Glycine max
cagttagtggacaataacag

SEQ ID NO: 2534 - DNA, 20 bp, Glycine max
ttcaggtacagatcagttag

SEQ ID NO: 2535 - DNA, 20 bp, Glycine max
actgatctgtacctgaactt

SEQ ID NO: 2536 - DNA, 20 bp, Glycine max
attgtttggacccaaagttc

SEQ ID NO: 2537 - DNA, 20 bp, Glycine max
ctgatctgtacctgaacttt

SEQ ID NO: 2538 - DNA, 20 bp, Glycine max
cttttctgaggtcaattgtt

SEQ ID NO: 2539 - DNA, 20 bp, Glycine max
caaacaattgacctcagaaa

SEQ ID NO: 2540 - DNA, 20 bp, Glycine max
actccataaaaccttttctg

SEQ ID NO: 2541 - DNA, 20 bp, Glycine max
tgacctcagaaaaggtttta

SEQ ID NO: 2542 - DNA, 20 bp, Glycine max
gtctagtgttatacagatta

SEQ ID NO: 2543 - DNA, 20 bp, Glycine max
gttccattttaaaaactaat

SEQ ID NO: 2544 - DNA, 20 bp, Glycine max
ttacctattagtttttaaaa

SEQ ID NO: 2545 - DNA, 20 bp, Glycine max
aatggaacattgtgctgaac

SEQ ID NO: 2546 - DNA, 20 bp, Glycine max
atggaacattgtgctgaaca

SEQ ID NO: 2547 - DNA, 20 bp, Glycine max
tgaacagggtatagtatttg

SEQ ID NO: 2548 - DNA, 20 bp, Glycine max
gaacagggtatagtatttgt

SEQ ID NO: 2549 - DNA, 20 bp, Glycine max
tgtcatgagtctcaaacaag

SEQ ID NO: 2550 - DNA, 20 bp, Glycine max
gactcatgacatcaataata

SEQ ID NO: 2551 - DNA, 20 bp, Glycine max
acatcaataatatggaaatg

SEQ ID NO: 2552 - DNA, 20 bp, Glycine max
aatttatacagtattctatt

SEQ ID NO: 2553 - DNA, 20 bp, Glycine max
atttatacagtattctatta

SEQ ID NO: 2554 - DNA, 20 bp, Glycine max
aacatctttaatggggaggg

SEQ ID NO: 2555 - DNA, 20 bp, Glycine max
taacatctttaatggggagg

SEQ ID NO: 2556 - DNA, 20 bp, Glycine max
ataacatctttaatggggag

SEQ ID NO: 2557 - DNA, 20 bp, Glycine max
tataacatctttaatgggga

SEQ ID NO: 2558 - DNA, 20 bp, Glycine max
atataacatctttaatgggg

SEQ ID NO: 2559 - DNA, 20 bp, Glycine max
gagatataacatctttaatg

SEQ ID NO: 2560 - DNA, 20 bp, Glycine max
tgagatataacatctttaat

SEQ ID NO: 2561 - DNA, 20 bp, Glycine max
atgagatataacatctttaa

SEQ ID NO: 2562 - DNA, 20 bp, Glycine max
tcatctttatcttttgttgt

SEQ ID NO: 2563 - DNA, 20 bp, Glycine max
tctttatcttttgttgtagg

SEQ ID NO: 2564 - DNA, 20 bp, Glycine max
gtaggtggatttgttttaac

SEQ ID NO: 2565 - DNA, 20 bp, Glycine max
ggtggatttgttttaactgg

SEQ ID NO: 2566 - DNA, 20 bp, Glycine max
gtggatttgttttaactgga

SEQ ID NO: 2567 - DNA, 20 bp, Glycine max
gttttaactggagggattat

SEQ ID NO: 2568 - DNA, 20 bp, Glycine max
ttgcaggactccgtgaaaat

SEQ ID NO: 2569 - DNA, 20 bp, Glycine max
ttattggattcctattttca

SEQ ID NO: 2570 - DNA, 20 bp, Glycine max
acaccactgcctagtgttgc

SEQ ID NO: 2571 - DNA, 20 bp, Glycine max
tcacggagtcctgcaacact

SEQ ID NO: 2572 - DNA, 20 bp, Glycine max
agtcctgcaacactaggcag

SEQ ID NO: 2573 - DNA, 20 bp, Glycine max
ctaggcagtggtgtgctctt

SEQ ID NO: 2574 - DNA, 20 bp, Glycine max
taggcagtggtgtgctcttt

SEQ ID NO: 2575 - DNA, 20 bp, Glycine max
aggcagtggtgtgctctttg

SEQ ID NO: 2576 - DNA, 20 bp, Glycine max
ggcagtggtgtgctctttgg

SEQ ID NO: 2577 - DNA, 20 bp, Glycine max
ccttcatgctaaaggtgcta

SEQ ID NO: 2578 - DNA, 20 bp, Glycine max
cctccaaaccttcatgctaa

SEQ ID NO: 2579 - DNA, 20 bp, Glycine max
ccttagcacctttagcatga

SEQ ID NO: 2580 - DNA, 20 bp, Glycine max
gcacctttagcatgaaggtt

SEQ ID NO: 2581 - DNA, 20 bp, Glycine max
cctttagcatgaaggtttgg

SEQ ID NO: 2582 - DNA, 20 bp, Glycine max
agcatgaaggtttggaggca

SEQ ID NO: 2583 - DNA, 20 bp, Glycine max
cctgcttgtcctagaataaa

SEQ ID NO: 2584 - DNA, 20 bp, Glycine max
tcgagtttaccatttattct

SEQ ID NO: 2585 - DNA, 20 bp, Glycine max
ccatttattctaggacaagc

SEQ ID NO: 2586 - DNA, 20 bp, Glycine max
tgatttaagcagcattaata

SEQ ID NO: 2587 - DNA, 20 bp, Glycine max
aagcagcattaatatggcat

SEQ ID NO: 2588 - DNA, 20 bp, Glycine max
cattaatatggcattggtct

SEQ ID NO: 2589 - DNA, 20 bp, Glycine max
agctgcagcataatcttatt

SEQ ID NO: 2590 - DNA, 20 bp, Glycine max
gtttctttattttacagctt

SEQ ID NO: 2591 - DNA, 20 bp, Glycine max
ctttattttacagctttggc

SEQ ID NO: 2592 - DNA, 20 bp, Glycine max
tttattttacagctttggca

SEQ ID NO: 2593 - DNA, 20 bp, Glycine max
ttattttacagctttggcag

SEQ ID NO: 2594 - DNA, 20 bp, Glycine max
ctttggcaggggttcttatc

SEQ ID NO: 2595 - DNA, 20 bp, Glycine max
gaactttcaaagctactcat

SEQ ID NO: 2596 - DNA, 20 bp, Glycine max
attggtagtacatctatttt

SEQ ID NO: 2597 - DNA, 20 bp, Glycine max
gttatacttatttgcatttc

SEQ ID NO: 2598 - DNA, 20 bp, Glycine max
ttatttgcatttctggatgc

SEQ ID NO: 2599 - DNA, 20 bp, Glycine max
ggcaaagaaaatatttccaa

SEQ ID NO: 2600 - DNA, 20 bp, Glycine max
gcaaagaaaatatttccaac

SEQ ID NO: 2601 - DNA, 20 bp, Glycine max
ataatagcactaatgcccgt

SEQ ID NO: 2602 - DNA, 20 bp, Glycine max
cgggcattagtgctattata

SEQ ID NO: 2603 - DNA, 20 bp, Glycine max
attaattaggataaaagcaa

SEQ ID NO: 2604 - DNA, 20 bp, Glycine max
agaccaaagtataattaatt

SEQ ID NO: 2605 - DNA, 20 bp, Glycine max
tatcctaattaattatactt

SEQ ID NO: 2606 - DNA, 20 bp, Glycine max
taattgttcttttagcccct

SEQ ID NO: 2607 - DNA, 20 bp, Glycine max
aattgttcttttagcccctt

SEQ ID NO: 2608 - DNA, 20 bp, Glycine max
aggacaatctaacacccaag

SEQ ID NO: 2609 - DNA, 20 bp, Glycine max
taggacaatctaacacccaa

SEQ ID NO: 2610 - DNA, 20 bp, Glycine max
ttaggacaatctaacaccca

SEQ ID NO: 2611 - DNA, 20 bp, Glycine max
gtgttagattgtcctaattt

SEQ ID NO: 2612 - DNA, 20 bp, Glycine max
aaagcgatcaatccaaaatt

SEQ ID NO: 2613 - DNA, 20 bp, Glycine max
gattgatcgctttatgcttg

SEQ ID NO: 2614 - DNA, 20 bp, Glycine max
attgatcgctttatgcttgc

SEQ ID NO: 2615 - DNA, 20 bp, Glycine max
tatttatatgtgcttatctc

SEQ ID NO: 2616 - DNA, 20 bp, Glycine max
ttatatgtgcttatctctgg

SEQ ID NO: 2617 - DNA, 20 bp, Glycine max
ggcttcaatttcttaggtgg

SEQ ID NO: 2618 - DNA, 20 bp, Glycine max
tggcttcaatttcttaggtg

SEQ ID NO: 2619 - DNA, 20 bp, Glycine max
atggcttcaatttcttaggt

SEQ ID NO: 2620 - DNA, 20 bp, Glycine max
gatggcttcaatttcttagg

SEQ ID NO: 2621 - DNA, 20 bp, Glycine max
gcagatggcttcaatttctt

SEQ ID NO: 2622 - DNA, 20 bp, Glycine max
catcatgcagtgctggcaga

SEQ ID NO: 2623 - DNA, 20 bp, Glycine max
actatctcatcatgcagtgc

SEQ ID NO: 2624 - DNA, 20 bp, Glycine max
actgcatgatgagatagtca

SEQ ID NO: 2625 - DNA, 20 bp, Glycine max
attatatccccatattctac

SEQ ID NO: 2626 - DNA, 20 bp, Glycine max
ttatgctagcctgtagaata

SEQ ID NO: 2627 - DNA, 20 bp, Glycine max
tatgctagcctgtagaatat

SEQ ID NO: 2628 - DNA, 20 bp, Glycine max
atgctagcctgtagaatatg

SEQ ID NO: 2629 - DNA, 20 bp, Glycine max
ctgtgaattgaaataagttt

SEQ ID NO: 2630 - DNA, 2136 bp, Glycine max
atgccaccaaactcatacataggtcacaaactaacaaacagtcgtagtagacggtggaaaaatgtatatgttggtgtacattggtgcatgcacgtgatgatactcacctacccttcaaccctcacatacatataaaatgccatctcctcaaacaagttcaaagcacaccttcatttcaacctctctgattttgtaattgagttcgatcaaatagctcccagtactttaattgatttctgaatatcatcacttaatttgaaggaaagatggtgagcgtagctgagatccgccaggcacaaagggcagaaggcccagcaaccatccttgccattggaactgcaaacccaccaaactgtgttgatcagagcacctatcctgactactacttcagaatcaccaacagtgagcacatgaccgagctcaaagagaaattccagcgcatgtgtatgtcccactactctcatcttcttatcttcttttttaatttccatatttaactcactaccacagaattgtttttttacatcagttaatttgacaccatttgatacatcttatctctgttttcttgtcacgttatatcatctattatatctgtgaatcccttgaaagaaaataaaatttaattgggtgcaaatattaaaagggcatcaatgtttgtaccattataaattacttacaatattgttgaatcaacctaattagtttagatatttaaaaaattagagattattacaacaatagtagtcattttgtgattcattataattagagattattagtctttaactctccctcaaaattcaaatactcgactttcaacaaaaaaaaaaaagttattcattattgtgtatgttgtgttaattttacaatatagctagattgacattaatatttctttatgactaatttcaggtgacaagtctatgatcaagaggagatatatgtacctaaacgaagagatcttgaaagagaatccaaacatgtgtgcttacatggcaccttctttggatgctaggcaagacatggtggtggtagaggtaccaaagctagggaaagaggctgcagtaaaggccataaaggagtggggccagccaaagtcaaagattacccacttgatcttctgcaccaccagtggtgttgacatgcctggtgctgattaccaactgaccaaacaattgggccttcgcccctatgtgaagaggtatatgatgtaccaacaaggttgctttgcaggtggcacggttcttcgtttggccaaggatttggctgagaacaacaagggtgcacgtgtgcttgttgtctgttctgagatcactgcagtcacattccgtggaccaagtgacactcaccttgatagtcttgtgggccaagcattgtttggagatggagctgctgctgtcattgttggttctgacccaattccacaagttgagaagcctttgtatgagcttgtttggactgcacaaacaattgctccagacagtgaaggtgctattgatggacaccttcgtgaggttggactcacatttcacctcctcaaggatgttcccgggattgtctcaaagaacattgacaaggcactttttgaggctttcaacccattgaacatctctgattacaactccatcttttggattgcacaccccggtgggcctgctattcttgaccaagttgagcaaaagttaggtctcaaacctgagaagatgaaggccactagagatgtgcttagtgaatatgggaacatgtcaagtgcttgtgttcttttcatcttggatgagatgaggaggaaatctgctgaaaatggacttaaaaccacaggtgaaggacttgaatggggtgtgttgttcggttttggacctggacttaccattgaaactgttgttctgcgcagtgtggccatctgagatgcctaatatattatttcattattgtgtaccacttttcaaacttgctggagtttgtaacaacaacaacaacaaaaaaaaaaaaactcgtttagagtttgtaattgtgtacgtttatattcaaataataatacatgttcgatggccttttagcctaatttcatgataacagacatttgtctgaaaaaaaataattctttcatgatttatattataaattttatcttag

SEQ ID NO: 2631 - DNA, 1170 bp, Glycine max
atggtgagcgtagctgagatccgccaggcacaaagggcagaaggcccagcaaccatccttgccattggaactgcaaacccaccaaactgtgttgatcagagcacctatcctgactactacttcagaatcaccaacagtgagcacatgaccgagctcaaagagaaattccagcgcatgtgtgacaagtctatgatcaagaggagatatatgtacctaaacgaagagatcttgaaagagaatccaaacatgtgtgcttacatggcaccttctttggatgctaggcaagacatggtggtggtagaggtaccaaagctagggaaagaggctgcagtaaaggccataaaggagtggggccagccaaagtcaaagattacccacttgatcttctgcaccaccagtggtgttgacatgcctggtgctgattaccaactgaccaaacaattgggccttcgcccctatgtgaagaggtatatgatgtaccaacaaggttgctttgcaggtggcacggttcttcgtttggccaaggatttggctgagaacaacaagggtgcacgtgtgcttgttgtctgttctgagatcactgcagtcacattccgtggaccaagtgacactcaccttgatagtcttgtgggccaagcattgtttggagatggagctgctgctgtcattgttggttctgacccaattccacaagttgagaagcctttgtatgagcttgtttggactgcacaaacaattgctccagacagtgaaggtgctattgatggacaccttcgtgaggttggactcacatttcacctcctcaaggatgttcccgggattgtctcaaagaacattgacaaggcactttttgaggctttcaacccattgaacatctctgattacaactccatcttttggattgcacaccccggtgggcctgctattcttgaccaagttgagcaaaagttaggtctcaaacctgagaagatgaaggccactagagatgtgcttagtgaatatgggaacatgtcaagtgcttgtgttcttttcatcttggatgagatgaggaggaaatctgctgaaaatggacttaaaaccacaggtgaaggacttgaatggggtgtgttgttcggttttggacctggacttaccattgaaactgttgttctgcgcagtgtggccatctga

SEQ ID NO: 2632 - protein, 389 aa, Glycine max
MVSVAEIRQAQRAEGPATILAIGTANPPNCVDQSTYPDYYFRITNSEHMTELKEKFQRMCDKSMIKRRYMYLNEEILKENPNMCAYMAPSLDARQDMVVVEVPKLGKEAAVKAIKEWGQPKSKITHLIFCTTSGVDMPGADYQLTKQLGLRPYVKRYMMYQQGCFAGGTVLRLAKDLAENNKGARVLVVCSEITAVTFRGPSDTHLDSLVGQALFGDGAAAVIVGSDPIPQVEKPLYELVWTAQTIAPDSEGAIDGHLREVGLTFHLLKDVPGIVSKNIDKALFEAFNPLNISDYNSIFWIAHPGGPAILDQVEQKLGLKPEKMKATRDVLSEYGNMSSACVLFILDEMRRKSAENGLKTTGEGLEWGVLFGFGPGLTIETVVLRSVAI

SEQ ID NO: 2633 - DNA, 20 bp, Glycine max
tgacctatgtatgagtttgg

SEQ ID NO: 2634 - DNA, 20 bp, Glycine max
ttgtgacctatgtatgagtt

SEQ ID NO: 2635 - DNA, 20 bp, Glycine max
atgccaccaaactcatacat

SEQ ID NO: 2636 - DNA, 20 bp, Glycine max
taacaaacagtcgtagtaga

SEQ ID NO: 2637 - DNA, 20 bp, Glycine max
caaacagtcgtagtagacgg

SEQ ID NO: 2638 - DNA, 20 bp, Glycine max
cggtggaaaaatgtatatgt

SEQ ID NO: 2639 - DNA, 20 bp, Glycine max
atgtatatgttggtgtacat

SEQ ID NO: 2640 - DNA, 20 bp, Glycine max
gtatgtgagggttgaagggt

SEQ ID NO: 2641 - DNA, 20 bp, Glycine max
atatgtatgtgagggttgaa

SEQ ID NO: 2642 - DNA, 20 bp, Glycine max
tatatgtatgtgagggttga

SEQ ID NO: 2643 - DNA, 20 bp, Glycine max
ggcattttatatgtatgtga

SEQ ID NO: 2644 - DNA, 20 bp, Glycine max
tggcattttatatgtatgtg

SEQ ID NO: 2645 - DNA, 20 bp, Glycine max
tttgaacttgtttgaggaga

SEQ ID NO: 2646 - DNA, 20 bp, Glycine max
gtgtgctttgaacttgtttg

SEQ ID NO: 2647 - DNA, 20 bp, Glycine max
aatcagagaggttgaaatga

SEQ ID NO: 2648 - DNA, 20 bp, Glycine max
actcaattacaaaatcagag

SEQ ID NO: 2649 - DNA, 20 bp, Glycine max
cagaaatcaattaaagtact

SEQ ID NO: 2650 - DNA, 20 bp, Glycine max
tcagaaatcaattaaagtac

SEQ ID NO: 2651 - DNA, 20 bp, Glycine max
aatatcatcacttaatttga

SEQ ID NO: 2652 - DNA, 20 bp, Glycine max
cacttaatttgaaggaaaga

SEQ ID NO: 2653 - DNA, 20 bp, Glycine max
gagcgtagctgagatccgcc

SEQ ID NO: 2654 - DNA, 20 bp, Glycine max
cttctgccctttgtgcctgg

SEQ ID NO: 2655 - DNA, 20 bp, Glycine max
ggccttctgccctttgtgcc

SEQ ID NO: 2656 - DNA, 20 bp, Glycine max
ctgagatccgccaggcacaa

SEQ ID NO: 2657 - DNA, 20 bp, Glycine max
tgagatccgccaggcacaaa

SEQ ID NO: 2658 - DNA, 20 bp, Glycine max
cgccaggcacaaagggcaga

SEQ ID NO: 2659 - DNA, 20 bp, Glycine max
caatggcaaggatggttgct

SEQ ID NO: 2660 - DNA, 20 bp, Glycine max
ccaatggcaaggatggttgc

SEQ ID NO: 2661 - DNA, 20 bp, Glycine max
tgcagttccaatggcaagga

SEQ ID NO: 2662 - DNA, 20 bp, Glycine max
ccagcaaccatccttgccat

SEQ ID NO: 2663 - DNA, 20 bp, Glycine max
ggtttgcagttccaatggca

SEQ ID NO: 2664 - DNA, 20 bp, Glycine max
tggtgggtttgcagttccaa

SEQ ID NO: 2665 - DNA, 20 bp, Glycine max
tctgatcaacacagtttggt

SEQ ID NO: 2666 - DNA, 20 bp, Glycine max
ctctgatcaacacagtttgg

SEQ ID NO: 2667 - DNA, 20 bp, Glycine max
gtgctctgatcaacacagtt

SEQ ID NO: 2668 - DNA, 20 bp, Glycine max
tctgaagtagtagtcaggat

SEQ ID NO: 2669 - DNA, 20 bp, Glycine max
gtgattctgaagtagtagtc

SEQ ID NO: 2670 - DNA, 20 bp, Glycine max
ctcggtcatgtgctcactgt

SEQ ID NO: 2671 - DNA, 20 bp, Glycine max
ctggaatttctctttgagct

SEQ ID NO: 2672 - DNA, 20 bp, Glycine max
agtgggacatacacatgcgc

SEQ ID NO: 2673 - DNA, 20 bp, Glycine max
gataagaagatgagagtagt

SEQ ID NO: 2674 - DNA, 20 bp, Glycine max
agataagaagatgagagtag

SEQ ID NO: 2675 - DNA, 20 bp, Glycine max
ctgtggtagtgagttaaata

SEQ ID NO: 2676 - DNA, 20 bp, Glycine max
gatgtaaaaaaacaattctg

SEQ ID NO: 2677 - DNA, 20 bp, Glycine max
cagagataagatgtatcaaa

SEQ ID NO: 2678 - DNA, 20 bp, Glycine max
taaattttattttctttcaa

SEQ ID NO: 2679 - DNA, 20 bp, Glycine max
ttaaattttattttctttca

SEQ ID NO: 2680 - DNA, 20 bp, Glycine max
gaaagaaaataaaatttaat

SEQ ID NO: 2681 - DNA, 20 bp, Glycine max
aaagaaaataaaatttaatt

SEQ ID NO: 2682 - DNA, 20 bp, Glycine max
aattgggtgcaaatattaaa

SEQ ID NO: 2683 - DNA, 20 bp, Glycine max
attgggtgcaaatattaaaa

SEQ ID NO: 2684 - DNA, 20 bp, Glycine max
atattgtaagtaatttataa

SEQ ID NO: 2685 - DNA, 20 bp, Glycine max
tttaaatatctaaactaatt

SEQ ID NO: 2686 - DNA, 20 bp, Glycine max
gtcgagtatttgaattttga

SEQ ID NO: 2687 - DNA, 20 bp, Glycine max
agtcgagtatttgaattttg

SEQ ID NO: 2688 - DNA, 20 bp, Glycine max
atttctttatgactaatttc

SEQ ID NO: 2689 - DNA, 20 bp, Glycine max
gtgacaagtctatgatcaag

SEQ ID NO: 2690 - DNA, 20 bp, Glycine max
ctttcaagatctcttcgttt

SEQ ID NO: 2691 - DNA, 20 bp, Glycine max
gccatgtaagcacacatgtt

SEQ ID NO: 2692 - DNA, 20 bp, Glycine max
tccaaacatgtgtgcttaca

SEQ ID NO: 2693 - DNA, 20 bp, Glycine max
tgcttacatggcaccttctt

SEQ ID NO: 2694 - DNA, 20 bp, Glycine max
tcttgcctagcatccaaaga

SEQ ID NO: 2695 - DNA, 20 bp, Glycine max
tggcaccttctttggatgct

SEQ ID NO: 2696 - DNA, 20 bp, Glycine max
tttggatgctaggcaagaca

SEQ ID NO: 2697 - DNA, 20 bp, Glycine max
ggatgctaggcaagacatgg

SEQ ID NO: 2698 - DNA, 20 bp, Glycine max
tgctaggcaagacatggtgg

SEQ ID NO: 2699 - DNA, 20 bp, Glycine max
gcaagacatggtggtggtag

SEQ ID NO: 2700 - DNA, 20 bp, Glycine max
gtggtagaggtaccaaagct

SEQ ID NO: 2701 - DNA, 20 bp, Glycine max
tggtagaggtaccaaagcta

SEQ ID NO: 2702 - DNA, 20 bp, Glycine max
gcagcctctttccctagctt

SEQ ID NO: 2703 - DNA, 20 bp, Glycine max
ggtaccaaagctagggaaag

SEQ ID NO: 2704 - DNA, 20 bp, Glycine max
agggaaagaggctgcagtaa

SEQ ID NO: 2705 - DNA, 20 bp, Glycine max
ggctgcagtaaaggccataa

SEQ ID NO: 2706 - DNA, 20 bp, Glycine max
tggctggccccactccttta

SEQ ID NO: 2707 - DNA, 20 bp, Glycine max
cagtaaaggccataaaggag

SEQ ID NO: 2708 - DNA, 20 bp, Glycine max
agtaaaggccataaaggagt

SEQ ID NO: 2709 - DNA, 20 bp, Glycine max
gtaaaggccataaaggagtg

SEQ ID NO: 2710 - DNA, 20 bp, Glycine max
gggtaatctttgactttggc

SEQ ID NO: 2711 - DNA, 20 bp, Glycine max
aagtgggtaatctttgactt

SEQ ID NO: 2712 - DNA, 20 bp, Glycine max
ggtggtgcagaagatcaagt

SEQ ID NO: 2713 - DNA, 20 bp, Glycine max
tggtggtgcagaagatcaag

SEQ ID NO: 2714 - DNA, 20 bp, Glycine max
ttgatcttctgcaccaccag

SEQ ID NO: 2715 - DNA, 20 bp, Glycine max
aggcatgtcaacaccactgg

SEQ ID NO: 2716 - DNA, 20 bp, Glycine max
accaggcatgtcaacaccac

SEQ ID NO: 2717 - DNA, 20 bp, Glycine max
accagtggtgttgacatgcc

SEQ ID NO: 2718 - DNA, 20 bp, Glycine max
gtcagttggtaatcagcacc

SEQ ID NO: 2719 - DNA, 20 bp, Glycine max
ggcccaattgtttggtcagt

SEQ ID NO: 2720 - DNA, 20 bp, Glycine max
ttaccaactgaccaaacaat

SEQ ID NO: 2721 - DNA, 20 bp, Glycine max
ggggcgaaggcccaattgtt

SEQ ID NO: 2722 - DNA, 20 bp, Glycine max
taccaactgaccaaacaatt

SEQ ID NO: 2723 - DNA, 20 bp, Glycine max
acctcttcacataggggcga

SEQ ID NO: 2724 - DNA, 20 bp, Glycine max
tcatatacctcttcacatag

SEQ ID NO: 2725 - DNA, 20 bp, Glycine max
atcatatacctcttcacata

SEQ ID NO: 2726 - DNA, 20 bp, Glycine max
catcatatacctcttcacat

SEQ ID NO: 2727 - DNA, 20 bp, Glycine max
gccttcgcccctatgtgaag

SEQ ID NO: 2728 - DNA, 20 bp, Glycine max
aggtatatgatgtaccaaca

SEQ ID NO: 2729 - DNA, 20 bp, Glycine max
cacctgcaaagcaaccttgt

SEQ ID NO: 2730 - DNA, 20 bp, Glycine max
taccaacaaggttgctttgc

SEQ ID NO: 2731 - DNA, 20 bp, Glycine max
caacaaggttgctttgcagg

SEQ ID NO: 2732 - DNA, 20 bp, Glycine max
aggttgctttgcaggtggca

SEQ ID NO: 2733 - DNA, 20 bp, Glycine max
aggtggcacggttcttcgtt

SEQ ID NO: 2734 - DNA, 20 bp, Glycine max
cacggttcttcgtttggcca

SEQ ID NO: 2735 - DNA, 20 bp, Glycine max
tcttcgtttggccaaggatt

SEQ ID NO: 2736 - DNA, 20 bp, Glycine max
gttgttctcagccaaatcct

SEQ ID NO: 2737 - DNA, 20 bp, Glycine max
ggatttggctgagaacaaca

SEQ ID NO: 2738 - DNA, 20 bp, Glycine max
gatttggctgagaacaacaa

SEQ ID NO: 2739 - DNA, 20 bp, Glycine max
atcactgcagtcacattccg

SEQ ID NO: 2740 - DNA, 20 bp, Glycine max
ggtgagtgtcacttggtcca

SEQ ID NO: 2741 - DNA, 20 bp, Glycine max
ctatcaaggtgagtgtcact

SEQ ID NO: 2742 - DNA, 20 bp, Glycine max
cttggcccacaagactatca

SEQ ID NO: 2743 - DNA, 20 bp, Glycine max
cactcaccttgatagtcttg

SEQ ID NO: 2744 - DNA, 20 bp, Glycine max
actcaccttgatagtcttgt

SEQ ID NO: 2745 - DNA, 20 bp, Glycine max
ctccatctccaaacaatgct

SEQ ID NO: 2746 - DNA, 20 bp, Glycine max
cttgtgggccaagcattgtt

SEQ ID NO: 2747 - DNA, 20 bp, Glycine max
ggccaagcattgtttggaga

SEQ ID NO: 2748 - DNA, 20 bp, Glycine max
ggagctgctgctgtcattgt

SEQ ID NO: 2749 - DNA, 20 bp, Glycine max
gcttctcaacttgtggaatt

SEQ ID NO: 2750 - DNA, 20 bp, Glycine max
ggcttctcaacttgtggaat

SEQ ID NO: 2751 - DNA, 20 bp, Glycine max
tacaaaggcttctcaacttg

SEQ ID NO: 2752 - DNA, 20 bp, Glycine max
gtccaaacaagctcatacaa

SEQ ID NO: 2753 - DNA, 20 bp, Glycine max
agcctttgtatgagcttgtt

SEQ ID NO: 2754 - DNA, 20 bp, Glycine max
tcaatagcaccttcactgtc

SEQ ID NO: 2755 - DNA, 20 bp, Glycine max
acaattgctccagacagtga

SEQ ID NO: 2756 - DNA, 20 bp, Glycine max
gacagtgaaggtgctattga

SEQ ID NO: 2757 - DNA, 20 bp, Glycine max
tattgatggacaccttcgtg

SEQ ID NO: 2758 - DNA, 20 bp, Glycine max
atgtgagtccaacctcacga

SEQ ID NO: 2759 - DNA, 20 bp, Glycine max
gatggacaccttcgtgaggt

SEQ ID NO: 2760 - DNA, 20 bp, Glycine max
actcacatttcacctcctca

SEQ ID NO: 2761 - DNA, 20 bp, Glycine max
tcccgggaacatccttgagg

SEQ ID NO: 2762 - DNA, 20 bp, Glycine max
caatcccgggaacatccttg

SEQ ID NO: 2763 - DNA, 20 bp, Glycine max
cacctcctcaaggatgttcc

SEQ ID NO: 2764 - DNA, 20 bp, Glycine max
acctcctcaaggatgttccc

SEQ ID NO: 2765 - DNA, 20 bp, Glycine max
atgttctttgagacaatccc

SEQ ID NO: 2766 - DNA, 20 bp, Glycine max
aatgttctttgagacaatcc

SEQ ID NO: 2767 - DNA, 20 bp, Glycine max
tgtctcaaagaacattgaca

SEQ ID NO: 2768 - DNA, 20 bp, Glycine max
cattgacaaggcactttttg

SEQ ID NO: 2769 - DNA, 20 bp, Glycine max
tgtaatcagagatgttcaat

SEQ ID NO: 2770 - DNA, 20 bp, Glycine max
ttgtaatcagagatgttcaa

SEQ ID NO: 2771 - DNA, 20 bp, Glycine max
ctgattacaactccatcttt

SEQ ID NO: 2772 - DNA, 20 bp, Glycine max
ggggtgtgcaatccaaaaga

SEQ ID NO: 2773 - DNA, 20 bp, Glycine max
atcttttggattgcacaccc

SEQ ID NO: 2774 - DNA, 20 bp, Glycine max
ttttggattgcacaccccgg

SEQ ID NO: 2775 - DNA, 20 bp, Glycine max
tttggattgcacaccccggt

SEQ ID NO: 2776 - DNA, 20 bp, Glycine max
caagaatagcaggcccaccg

SEQ ID NO: 2777 - DNA, 20 bp, Glycine max
tcaagaatagcaggcccacc

SEQ ID NO: 2778 - DNA, 20 bp, Glycine max
gtcaagaatagcaggcccac

SEQ ID NO: 2779 - DNA, 20 bp, Glycine max
tcaacttggtcaagaatagc

SEQ ID NO: 2780 - DNA, 20 bp, Glycine max
gacctaacttttgctcaact

SEQ ID NO: 2781 - DNA, 20 bp, Glycine max
gaccaagttgagcaaaagtt

SEQ ID NO: 2782 - DNA, 20 bp, Glycine max
ctagtggccttcatcttctc

SEQ ID NO: 2783 - DNA, 20 bp, Glycine max
tctcaaacctgagaagatga

SEQ ID NO: 2784 - DNA, 20 bp, Glycine max
ttcactaagcacatctctag

SEQ ID NO: 2785 - DNA, 20 bp, Glycine max
agagatgtgcttagtgaata

SEQ ID NO: 2786 - DNA, 20 bp, Glycine max
gagatgtgcttagtgaatat

SEQ ID NO: 2787 - DNA, 20 bp, Glycine max
tgcttgtgttcttttcatct

SEQ ID NO: 2788 - DNA, 20 bp, Glycine max
ttttcatcttggatgagatg

SEQ ID NO: 2789 - DNA, 20 bp, Glycine max
tcatcttggatgagatgagg

SEQ ID NO: 2790 - DNA, 20 bp, Glycine max
aggaggaaatctgctgaaaa

SEQ ID NO: 2791 - DNA, 20 bp, Glycine max
gaaaatggacttaaaaccac

SEQ ID NO: 2792 - DNA, 20 bp, Glycine max
ccattcaagtccttcacctg

SEQ ID NO: 2793 - DNA, 20 bp, Glycine max
ggacttaaaaccacaggtga

SEQ ID NO: 2794 - DNA, 20 bp, Glycine max
ccacaggtgaaggacttgaa

SEQ ID NO: 2795 - DNA, 20 bp, Glycine max
cacaggtgaaggacttgaat

SEQ ID NO: 2796 - DNA, 20 bp, Glycine max
acaggtgaaggacttgaatg

SEQ ID NO: 2797 - DNA, 20 bp, Glycine max
cttgaatggggtgtgttgtt

SEQ ID NO: 2798 - DNA, 20 bp, Glycine max
tggggtgtgttgttcggttt

SEQ ID NO: 2799 - DNA, 20 bp, Glycine max
gtgttgttcggttttggacc

SEQ ID NO: 2800 - DNA, 20 bp, Glycine max
acagtttcaatggtaagtcc

SEQ ID NO: 2801 - DNA, 20 bp, Glycine max
gcgcagaacaacagtttcaa

SEQ ID NO: 2802 - DNA, 20 bp, Glycine max
aactgttgttctgcgcagtg

SEQ ID NO: 2803 - DNA, 20 bp, Glycine max
aatatattaggcatctcaga

SEQ ID NO: 2804 - DNA, 20 bp, Glycine max
caataatgaaataatatatt

SEQ ID NO: 2805 - DNA, 20 bp, Glycine max
actccagcaagtttgaaaag

SEQ ID NO: 2806 - DNA, 20 bp, Glycine max
gtaccacttttcaaacttgc

SEQ ID NO: 2807 - DNA, 20 bp, Glycine max
aaataataatacatgttcga

SEQ ID NO: 2808 - DNA, 20 bp, Glycine max
tatcatgaaattaggctaaa

SEQ ID NO: 2809 - DNA, 20 bp, Glycine max
atgtctgttatcatgaaatt

SEQ ID NO: 2810 - DNA, 2348 bp, Glycine max
ctcatcatagtggcgtgcggaatatccaaggatataaatagccatatattgggacataaagttgaacaatcacagagctgcagctaactgctatcgagagctacacacaagagtaagaccaaagcaaaaatacattatacaatatattatcgatccacatcaatttttgaagaagatggttagagctccttgttgtgaaaagatgggattgaagaagggtccttggaccccagaggaagatcaaatcctcatgtcatacatccaaaaacatggccatggaaattggcgtgccctcccaaagcttgcaggtactttaaattctcaatttacaaacaaaagaaacacattgaatttatgataattaatatatatttccattcacccttttatattataaagttggtaattgacatattccactttttggatgatttggagtcatgagattttttgtttattgattttattctgggttctttggtatcatttcttagggttattaaggtgtggcaagagctgcaggctaaggtggattaactatttaaggccagatatcaagagaggaaatttttcaagcgaagaagaggaaattatcattaagatgcatgagttgctggggaacaggtatatattggttgatttcttcttcagactaatggcattaatatgtttagtaccatgaataagatgagcattttaattagtttgcctgaaattgtaatgagcgattttgttctcgaaagtggatttgggtttccaatttcatgcttcttatctttttcttaatttctctgaaaagtaaacatgatttaattaagtggtgggggcaagcggcattaatattgataataagattgagaaggaattgggtccattgataattattataccaggcaaaagccataaaatgtgctagatagtctaggattgattgatttcattaatggacttttatcactttctaattaattttcgtaaaaaaatactagtaggaccaagacccttaaagtatgatttgtttttttttttaccatatcttaatgaagtacatataatattttaattgaagattttaattatttaataaggatcatgattatatatgatatggaaattaaagaataataaacatgtgggtgggttagcaagattctctcactatatttgccttgcacggcactaagtattatggcatatttcagagcacatgcaactattaacatacactagacgtacatatattccaatgagtgcatgagatttactgtctatgtaatcctacaaatcaatacagtccaacttttacttcgttgtttcctcaatctcttcaaccaagaaaccaaaacaagaatctgatgcattattaaattgatcttgatccatgttttcaggtggtcagcaattgcagcaaaattaccaggaagaactgacaatgaaataaaaaatgtgtggcacacccacttgaagaagaggctactgaattcagatatccaaaaaagggtttccaagccaagaatcaaacgatctgattccaattccagcacactaactcaattagaacctacatcatcagcatgcactacttctttaagtgacttttcatcatttagtgaagggactaaaaacatggacaacatgatcaagagtgaagacatagagtctgtggagacaataatgcctccaattgatgaaagcttttggtcagaggcaacagtggattatgaaagctccaccatgatgacatcaaattcttggacaatttcaaatgaattagcaccccctcaataccaatttaattcagtggaaagcttccaacaacaaagtgttgattataatggttcaaacgatgatcatgatggcatggatttctggtatgacatattcatcaaatcaggggagtcaatcgaattgccagagttctgaaattttcagacacattgagggtatcattgaattcggcagatagaaaacattttttaaaataataataataataataatcatatatgttacaaaattgaatttgacggttacaaggaattaaggaggacattaagagctagggtcattcattgataaaagaaactagcaacatttgtaaagggtaaaaatgattatgttatgatatcatcaaaatatgccagctaatctgagggaccaaaagggaaatactgactttgttttatgtatattgtgcaatacttcattcatgttcgtttaacattttttttttttgttaaaaaaatgattcattaggttagagttgttcaaattgtaatagcaataaattaattatgtaatttgcttcaaaaaaaattaattatgtaatgaagtattcaatttttttc

SEQ ID NO: 2811 - DNA, 795 bp, Glycine max
atggttagagctccttgttgtgaaaagatgggattgaagaagggtccttggaccccagaggaagatcaaatcctcatgtcatacatccaaaaacatggccatggaaattggcgtgccctcccaaagcttgcagggttattaaggtgtggcaagagctgcaggctaaggtggattaactatttaaggccagatatcaagagaggaaatttttcaagcgaagaagaggaaattatcattaagatgcatgagttgctggggaacaggtggtcagcaattgcagcaaaattaccaggaagaactgacaatgaaataaaaaatgtgtggcacacccacttgaagaagaggctactgaattcagatatccaaaaaagggtttccaagccaagaatcaaacgatctgattccaattccagcacactaactcaattagaacctacatcatcagcatgcactacttctttaagtgacttttcatcatttagtgaagggactaaaaacatggacaacatgatcaagagtgaagacatagagtctgtggagacaataatgcctccaattgatgaaagcttttggtcagaggcaacagtggattatgaaagctccaccatgatgacatcaaattcttggacaatttcaaatgaattagcaccccctcaataccaatttaattcagtggaaagcttccaacaacaaagtgttgattataatggttcaaacgatgatcatgatggcatggatttctggtatgacatattcatcaaatcaggggagtcaatcgaattgccagagttctga

SEQ ID NO: 2812 - protein, 264 aa, Glycine max
MVRAPCCEKMGLKKGPWTPEEDQILMSYIQKHGHGNWRALPKLAGLLRCGKSCRLRWINYLRPDIKRGNFSSEEEEIIIKMHELLGNRWSAIAAKLPGRTDNEIKNVWHTHLKKRLLNSDIQKRVSKPRIKRSDSNSSTLTQLEPTSSACTTSLSDFSSFSEGTKNMDNMIKSEDIESVETIMPPIDESFWSEATVDYESSTMMTSNSWTISNELAPPQYQFNSVESFQQQSVDYNGSNDDHDGMDFWYDIFIKSGESIELPEF

SEQ ID NO: 2813 - DNA, 20 bp, Glycine max
agtggcgtgcggaatatcca

SEQ ID NO: 2814 - DNA, 20 bp, Glycine max
tatatggctatttatatcct

SEQ ID NO: 2815 - DNA, 20 bp, Glycine max
ggatataaatagccatatat

SEQ ID NO: 2816 - DNA, 20 bp, Glycine max
gatataaatagccatatatt

SEQ ID NO: 2817 - DNA, 20 bp, Glycine max
caactttatgtcccaatata

SEQ ID NO: 2818 - DNA, 20 bp, Glycine max
tgtataatgtatttttgctt

SEQ ID NO: 2819 - DNA, 20 bp, Glycine max
atcttcttcaaaaattgatg

SEQ ID NO: 2820 - DNA, 20 bp, Glycine max
acatcaatttttgaagaaga

SEQ ID NO: 2821 - DNA, 20 bp, Glycine max
aatcccatcttttcacaaca

SEQ ID NO: 2822 - DNA, 20 bp, Glycine max
agctccttgttgtgaaaaga

SEQ ID NO: 2823 - DNA, 20 bp, Glycine max
gctccttgttgtgaaaagat

SEQ ID NO: 2824 - DNA, 20 bp, Glycine max
tgaaaagatgggattgaaga

SEQ ID NO: 2825 - DNA, 20 bp, Glycine max
gaaaagatgggattgaagaa

SEQ ID NO: 2826 - DNA, 20 bp, Glycine max
tgggattgaagaagggtcct

SEQ ID NO: 2827 - DNA, 20 bp, Glycine max
tgatcttcctctggggtcca

SEQ ID NO: 2828 - DNA, 20 bp, Glycine max
gaagggtccttggaccccag

SEQ ID NO: 2829 - DNA, 20 bp, Glycine max
gaggatttgatcttcctctg

SEQ ID NO: 2830 - DNA, 20 bp, Glycine max
tgaggatttgatcttcctct

SEQ ID NO: 2831 - DNA, 20 bp, Glycine max
atgaggatttgatcttcctc

SEQ ID NO: 2832 - DNA, 20 bp, Glycine max
gtttttggatgtatgacatg

SEQ ID NO: 2833 - DNA, 20 bp, Glycine max
atgtcatacatccaaaaaca

SEQ ID NO: 2834 - DNA, 20 bp, Glycine max
aatttccatggccatgtttt

SEQ ID NO: 2835 - DNA, 20 bp, Glycine max
tacatccaaaaacatggcca

SEQ ID NO: 2836 - DNA, 20 bp, Glycine max
ggagggcacgccaatttcca

SEQ ID NO: 2837 - DNA, 20 bp, Glycine max
aaaaacatggccatggaaat

SEQ ID NO: 2838 - DNA, 20 bp, Glycine max
agtacctgcaagctttggga

SEQ ID NO: 2839 - DNA, 20 bp, Glycine max
aagtacctgcaagctttggg

SEQ ID NO: 2840 - DNA, 20 bp, Glycine max
ttaaagtacctgcaagcttt

SEQ ID NO: 2841 - DNA, 20 bp, Glycine max
tttaaagtacctgcaagctt

SEQ ID NO: 2842 - DNA, 20 bp, Glycine max
cgtgccctcccaaagcttgc

SEQ ID NO: 2843 - DNA, 20 bp, Glycine max
ttataatataaaagggtgaa

SEQ ID NO: 2844 - DNA, 20 bp, Glycine max
accaactttataatataaaa

SEQ ID NO: 2845 - DNA, 20 bp, Glycine max
taccaactttataatataaa

SEQ ID NO: 2846 - DNA, 20 bp, Glycine max
acccttttatattataaagt

SEQ ID NO: 2847 - DNA, 20 bp, Glycine max
aattgacatattccactttt

SEQ ID NO: 2848 - DNA, 20 bp, Glycine max
actccaaatcatccaaaaag

SEQ ID NO: 2849 - DNA, 20 bp, Glycine max
attccactttttggatgatt

SEQ ID NO: 2850 - DNA, 20 bp, Glycine max
tttgtttattgattttattc

SEQ ID NO: 2851 - DNA, 20 bp, Glycine max
ttgtttattgattttattct

SEQ ID NO: 2852 - DNA, 20 bp, Glycine max
tgattttattctgggttctt

SEQ ID NO: 2853 - DNA, 20 bp, Glycine max
gttctttggtatcatttctt

SEQ ID NO: 2854 - DNA, 20 bp, Glycine max
ttctttggtatcatttctta

SEQ ID NO: 2855 - DNA, 20 bp, Glycine max
atcatttcttagggttatta

SEQ ID NO: 2856 - DNA, 20 bp, Glycine max
ttcttagggttattaaggtg

SEQ ID NO: 2857 - DNA, 20 bp, Glycine max
taaggtgtggcaagagctgc

SEQ ID NO: 2858 - DNA, 20 bp, Glycine max
gtggcaagagctgcaggcta

SEQ ID NO: 2859 - DNA, 20 bp, Glycine max
gcaagagctgcaggctaagg

SEQ ID NO: 2860 - DNA, 20 bp, Glycine max
taaggtggattaactattta

SEQ ID NO: 2861 - DNA, 20 bp, Glycine max
aaatttcctctcttgatatc

SEQ ID NO: 2862 - DNA, 20 bp, Glycine max
ttaaggccagatatcaagag

SEQ ID NO: 2863 - DNA, 20 bp, Glycine max
aaatttttcaagcgaagaag

SEQ ID NO: 2864 - DNA, 20 bp, Glycine max
cattaagatgcatgagttgc

SEQ ID NO: 2865 - DNA, 20 bp, Glycine max
attaagatgcatgagttgct

SEQ ID NO: 2866 - DNA, 20 bp, Glycine max
ttaagatgcatgagttgctg

SEQ ID NO: 2867 - DNA, 20 bp, Glycine max
tgcatgagttgctggggaac

SEQ ID NO: 2868 - DNA, 20 bp, Glycine max
gctggggaacaggtatatat

SEQ ID NO: 2869 - DNA, 20 bp, Glycine max
tgatttcttcttcagactaa

SEQ ID NO: 2870 - DNA, 20 bp, Glycine max
taaaatgctcatcttattca

SEQ ID NO: 2871 - DNA, 20 bp, Glycine max
aaatcgctcattacaatttc

SEQ ID NO: 2872 - DNA, 20 bp, Glycine max
agcgattttgttctcgaaag

SEQ ID NO: 2873 - DNA, 20 bp, Glycine max
tttgttctcgaaagtggatt

SEQ ID NO: 2874 - DNA, 20 bp, Glycine max
ttgttctcgaaagtggattt

SEQ ID NO: 2875 - DNA, 20 bp, Glycine max
aaagataagaagcatgaaat

SEQ ID NO: 2876 - DNA, 20 bp, Glycine max
gtaaacatgatttaattaag

SEQ ID NO: 2877 - DNA, 20 bp, Glycine max
aacatgatttaattaagtgg

SEQ ID NO: 2878 - DNA, 20 bp, Glycine max
acatgatttaattaagtggt

SEQ ID NO: 2879 - DNA, 20 bp, Glycine max
catgatttaattaagtggtg

SEQ ID NO: 2880 - DNA, 20 bp, Glycine max
atgatttaattaagtggtgg

SEQ ID NO: 2881 - DNA, 20 bp, Glycine max
aattaagtggtgggggcaag

SEQ ID NO: 2882 - DNA, 20 bp, Glycine max
tattgataataagattgaga

SEQ ID NO: 2883 - DNA, 20 bp, Glycine max
taataagattgagaaggaat

SEQ ID NO: 2884 - DNA, 20 bp, Glycine max
aataagattgagaaggaatt

SEQ ID NO: 2885 - DNA, 20 bp, Glycine max
cctggtataataattatcaa

SEQ ID NO: 2886 - DNA, 20 bp, Glycine max
ccattgataattattatacc

SEQ ID NO: 2887 - DNA, 20 bp, Glycine max
cacattttatggcttttgcc

SEQ ID NO: 2888 - DNA, 20 bp, Glycine max
agactatctagcacatttta

SEQ ID NO: 2889 - DNA, 20 bp, Glycine max
taaaatgtgctagatagtct

SEQ ID NO: 2890 - DNA, 20 bp, Glycine max
ggattgattgatttcattaa

SEQ ID NO: 2891 - DNA, 20 bp, Glycine max
tttcgtaaaaaaatactagt

SEQ ID NO: 2892 - DNA, 20 bp, Glycine max
aaatcatactttaagggtct

SEQ ID NO: 2893 - DNA, 20 bp, Glycine max
aaaaacaaatcatactttaa

SEQ ID NO: 2894 - DNA, 20 bp, Glycine max
aaaaaacaaatcatacttta

SEQ ID NO: 2895 - DNA, 20 bp, Glycine max
atatgtacttcattaagata

SEQ ID NO: 2896 - DNA, 20 bp, Glycine max
aagattttaattatttaata

SEQ ID NO: 2897 - DNA, 20 bp, Glycine max
gatcatgattatatatgata

SEQ ID NO: 2898 - DNA, 20 bp, Glycine max
attaaagaataataaacatg

SEQ ID NO: 2899 - DNA, 20 bp, Glycine max
ttaaagaataataaacatgt

SEQ ID NO: 2900 - DNA, 20 bp, Glycine max
aagaataataaacatgtggg

SEQ ID NO: 2901 - DNA, 20 bp, Glycine max
agaataataaacatgtgggt

SEQ ID NO: 2902 - DNA, 20 bp, Glycine max
ctcactatatttgccttgca

SEQ ID NO: 2903 - DNA, 20 bp, Glycine max
ataatacttagtgccgtgca

SEQ ID NO: 2904 - DNA, 20 bp, Glycine max
ttgcacggcactaagtatta

SEQ ID NO: 2905 - DNA, 20 bp, Glycine max
agtaaatctcatgcactcat

SEQ ID NO: 2906 - DNA, 20 bp, Glycine max
gttggactgtattgatttgt

SEQ ID NO: 2907 - DNA, 20 bp, Glycine max
ggaaacaacgaagtaaaagt

SEQ ID NO: 2908 - DNA, 20 bp, Glycine max
tttcttggttgaagagattg

SEQ ID NO: 2909 - DNA, 20 bp, Glycine max
agattcttgttttggtttct

SEQ ID NO: 2910 - DNA, 20 bp, Glycine max
aatgcatcagattcttgttt

SEQ ID NO: 2911 - DNA, 20 bp, Glycine max
ttgctgaccacctgaaaaca

SEQ ID NO: 2912 - DNA, 20 bp, Glycine max
tgatcttgatccatgttttc

SEQ ID NO: 2913 - DNA, 20 bp, Glycine max
tcttgatccatgttttcagg

SEQ ID NO: 2914 - DNA, 20 bp, Glycine max
gcaattgcagcaaaattacc

SEQ ID NO: 2915 - DNA, 20 bp, Glycine max
atttcattgtcagttcttcc

SEQ ID NO: 2916 - DNA, 20 bp, Glycine max
acaatgaaataaaaaatgtg

SEQ ID NO: 2917 - DNA, 20 bp, Glycine max
cagtagcctcttcttcaagt

SEQ ID NO: 2918 - DNA, 20 bp, Glycine max
tcagtagcctcttcttcaag

SEQ ID NO: 2919 - DNA, 20 bp, Glycine max
ggcacacccacttgaagaag

SEQ ID NO: 2920 - DNA, 20 bp, Glycine max
tgaattcagatatccaaaaa

SEQ ID NO: 2921 - DNA, 20 bp, Glycine max
gaattcagatatccaaaaaa

SEQ ID NO: 2922 - DNA, 20 bp, Glycine max
ttggcttggaaacccttttt

SEQ ID NO: 2923 - DNA, 20 bp, Glycine max
agatcgtttgattcttggct

SEQ ID NO: 2924 - DNA, 20 bp, Glycine max
gaatcagatcgtttgattct

SEQ ID NO: 2925 - DNA, 20 bp, Glycine max
ttgagttagtgtgctggaat

SEQ ID NO: 2926 - DNA, 20 bp, Glycine max
ttctaattgagttagtgtgc

SEQ ID NO: 2927 - DNA, 20 bp, Glycine max
gtagtgcatgctgatgatgt

SEQ ID NO: 2928 - DNA, 20 bp, Glycine max
gacttttcatcatttagtga

SEQ ID NO: 2929 - DNA, 20 bp, Glycine max
acttttcatcatttagtgaa

SEQ ID NO: 2930 - DNA, 20 bp, Glycine max
tagtgaagggactaaaaaca

SEQ ID NO: 2931 - DNA, 20 bp, Glycine max
gagtgaagacatagagtctg

SEQ ID NO: 2932 - DNA, 20 bp, Glycine max
caaaagctttcatcaattgg

SEQ ID NO: 2933 - DNA, 20 bp, Glycine max
gaccaaaagctttcatcaat

SEQ ID NO: 2934 - DNA, 20 bp, Glycine max
ctccaattgatgaaagcttt

SEQ ID NO: 2935 - DNA, 20 bp, Glycine max
tgatgaaagcttttggtcag

SEQ ID NO: 2936 - DNA, 20 bp, Glycine max
cttttggtcagaggcaacag

SEQ ID NO: 2937 - DNA, 20 bp, Glycine max
agaatttgatgtcatcatgg

SEQ ID NO: 2938 - DNA, 20 bp, Glycine max
ccaagaatttgatgtcatca

SEQ ID NO: 2939 - DNA, 20 bp, Glycine max
ccatgatgacatcaaattct

SEQ ID NO: 2940 - DNA, 20 bp, Glycine max
gaattaaattggtattgagg

SEQ ID NO: 2941 - DNA, 20 bp, Glycine max
tgaattaaattggtattgag

SEQ ID NO: 2942 - DNA, 20 bp, Glycine max
ctgaattaaattggtattga

SEQ ID NO: 2943 - DNA, 20 bp, Glycine max
actgaattaaattggtattg

SEQ ID NO: 2944 - DNA, 20 bp, Glycine max
agctttccactgaattaaat

SEQ ID NO: 2945 - DNA, 20 bp, Glycine max
tcaataccaatttaattcag

SEQ ID NO: 2946 - DNA, 20 bp, Glycine max
tataatcaacactttgttgt

SEQ ID NO: 2947 - DNA, 20 bp, Glycine max
caacaaagtgttgattataa

SEQ ID NO: 2948 - DNA, 20 bp, Glycine max
ggttcaaacgatgatcatga

SEQ ID NO: 2949 - DNA, 20 bp, Glycine max
aaacgatgatcatgatggca

SEQ ID NO: 2950 - DNA, 20 bp, Glycine max
atcatgatggcatggatttc

SEQ ID NO: 2951 - DNA, 20 bp, Glycine max
tatgacatattcatcaaatc

SEQ ID NO: 2952 - DNA, 20 bp, Glycine max
atgacatattcatcaaatca

SEQ ID NO: 2953 - DNA, 20 bp, Glycine max
tgacatattcatcaaatcag

SEQ ID NO: 2954 - DNA, 20 bp, Glycine max
gtctgaaaatttcagaactc

SEQ ID NO: 2955 - DNA, 20 bp, Glycine max
tgaaattttcagacacattg

SEQ ID NO: 2956 - DNA, 20 bp, Glycine max
gaaattttcagacacattga

SEQ ID NO: 2957 - DNA, 20 bp, Glycine max
attgagggtatcattgaatt

SEQ ID NO: 2958 - DNA, 20 bp, Glycine max
tgttacaaaattgaatttga

SEQ ID NO: 2959 - DNA, 20 bp, Glycine max
aattgaatttgacggttaca

SEQ ID NO: 2960 - DNA, 20 bp, Glycine max
ttgacggttacaaggaatta

SEQ ID NO: 2961 - DNA, 20 bp, Glycine max
acggttacaaggaattaagg

SEQ ID NO: 2962 - DNA, 20 bp, Glycine max
taaggaggacattaagagct

SEQ ID NO: 2963 - DNA, 20 bp, Glycine max
aaggaggacattaagagcta

SEQ ID NO: 2964 - DNA, 20 bp, Glycine max
gaaactagcaacatttgtaa

SEQ ID NO: 2965 - DNA, 20 bp, Glycine max
aaactagcaacatttgtaaa

SEQ ID NO: 2966 - DNA, 20 bp, Glycine max
ttttggtccctcagattagc

SEQ ID NO: 2967 - DNA, 20 bp, Glycine max
aaaatatgccagctaatctg

SEQ ID NO: 2968 - DNA, 20 bp, Glycine max
aaatatgccagctaatctga

SEQ ID NO: 2969 - DNA, 20 bp, Glycine max
agctaatctgagggaccaaa

SEQ ID NO: 2970 - DNA, 20 bp, Glycine max
gctaatctgagggaccaaaa

SEQ ID NO: 2971 - DNA, 20 bp, Glycine max
caaagtcagtatttcccttt

SEQ ID NO: 2972 - DNA, 20 bp, Glycine max
tgttaaaaaaatgattcatt

SEQ ID NO: 2973 - DNA, 748 bp, Glycine max
atctgaattattcacaaactagaagtattattattcttccatttccattaaaaagaaaatatcataaatgggtattttcacattcgaggacgaaatcacctcccctgtggctcctgctactctttacaaagctctagttacagatgccgacaacatcatcccaaaggctcttgattccttcaagagtgttgaaaacgttgagggaaatggtggccctggaacaatcaagaagataactttcgttgagggtactaactcactcactaatcactagattcatttcattattattccatctctacctatctatatgttgcaatgtatgaatggacagatggagaaaccaagtttgtactgcacaagatagaagcagttgatgaggcaaacttgggatatagctacagcgtagtgggtggtgctgcgttgccagacacagcggagaagatcacattccactccaaattggctgctggtcccaatggaggctctgctggcaagctcactgtcgaataccaaaccaaaggagatgctcagcccaaccaagaccaactcaaaactggaaaagccaaggctgatgctctcttcaaggccattgaggcttaccttttggccaatcccgattacaactaatccaattcgatcaacttcatgattatcatcactatctctcttgctttttctgagacttcatatatctgtatctcacttcatcaataaatcaacaaattataataaaggaaattagcca

SEQ ID NO: 2974 - DNA, 477 bp, Glycine max
atgggtattttcacattcgaggacgaaatcacctcccctgtggctcctgctactctttacaaagctctagttacagatgccgacaacatcatcccaaaggctcttgattccttcaagagtgttgaaaacgttgagggaaatggtggccctggaacaatcaagaagataactttcgttgaggatggagaaaccaagtttgtactgcacaagatagaagcagttgatgaggcaaacttgggatatagctacagcgtagtgggtggtgctgcgttgccagacacagcggagaagatcacattccactccaaattggctgctggtcccaatggaggctctgctggcaagctcactgtcgaataccaaaccaaaggagatgctcagcccaaccaagaccaactcaaaactggaaaagccaaggctgatgctctcttcaaggccattgaggcttaccttttggccaatcccgattacaactaa

SEQ ID NO: 2975 - protein, 158 aa, Glycine max
MGIFTFEDEITSPVAPATLYKALVTDADNIIPKALDSFKSVENVEGNGGPGTIKKITFVEDGETKFVLHKIEAVDEANLGYSYSVVGGAALPDTAEKITFHSKLAAGPNGGSAGKLTVEYQTKGDAQPNQDQLKTGKAKADALFKAIEAYLLANPDYN

SEQ ID NO: 2976 - DNA, 20 bp, Glycine max
tattttctttttaatggaaa

SEQ ID NO: 2977 - DNA, 20 bp, Glycine max
ttatgatattttctttttaa

SEQ ID NO: 2978 - DNA, 20 bp, Glycine max
taaaaagaaaatatcataaa

SEQ ID NO: 2979 - DNA, 20 bp, Glycine max
aaaaagaaaatatcataaat

SEQ ID NO: 2980 - DNA, 20 bp, Glycine max
aatgggtattttcacattcg

SEQ ID NO: 2981 - DNA, 20 bp, Glycine max
ggacgaaatcacctcccctg

SEQ ID NO: 2982 - DNA, 20 bp, Glycine max
agtagcaggagccacagggg

SEQ ID NO: 2983 - DNA, 20 bp, Glycine max
aagagtagcaggagccacag

SEQ ID NO: 2984 - DNA, 20 bp, Glycine max
aaagagtagcaggagccaca

SEQ ID NO: 2985 - DNA, 20 bp, Glycine max
taaagagtagcaggagccac

SEQ ID NO: 2986 - DNA, 20 bp, Glycine max
agagctttgtaaagagtagc

SEQ ID NO: 2987 - DNA, 20 bp, Glycine max
agcctttgggatgatgttgt

SEQ ID NO: 2988 - DNA, 20 bp, Glycine max
tgccgacaacatcatcccaa

SEQ ID NO: 2989 - DNA, 20 bp, Glycine max
tgaaggaatcaagagccttt

SEQ ID NO: 2990 - DNA, 20 bp, Glycine max
ttgaaggaatcaagagcctt

SEQ ID NO: 2991 - DNA, 20 bp, Glycine max
aacgttttcaacactcttga

SEQ ID NO: 2992 - DNA, 20 bp, Glycine max
caagagtgttgaaaacgttg

SEQ ID NO: 2993 - DNA, 20 bp, Glycine max
aagagtgttgaaaacgttga

SEQ ID NO: 2994 - DNA, 20 bp, Glycine max
gttgaaaacgttgagggaaa

SEQ ID NO: 2995 - DNA, 20 bp, Glycine max
gaaaacgttgagggaaatgg

SEQ ID NO: 2996 - DNA, 20 bp, Glycine max
gttgagggaaatggtggccc

SEQ ID NO: 2997 - DNA, 20 bp, Glycine max
ttatcttcttgattgttcca

SEQ ID NO: 2998 - DNA, 20 bp, Glycine max
gttatcttcttgattgttcc

SEQ ID NO: 2999 - DNA, 20 bp, Glycine max
caagaagataactttcgttg

SEQ ID NO: 3000 - DNA, 20 bp, Glycine max
aagaagataactttcgttga

SEQ ID NO: 3001 - DNA, 20 bp, Glycine max
aacatatagataggtagaga

SEQ ID NO: 3002 - DNA, 20 bp, Glycine max
atacattgcaacatatagat

SEQ ID NO: 3003 - DNA, 20 bp, Glycine max
tatatgttgcaatgtatgaa

SEQ ID NO: 3004 - DNA, 20 bp, Glycine max
gcaatgtatgaatggacaga

SEQ ID NO: 3005 - DNA, 20 bp, Glycine max
tatcttgtgcagtacaaact

SEQ ID NO: 3006 - DNA, 20 bp, Glycine max
caagatagaagcagttgatg

SEQ ID NO: 3007 - DNA, 20 bp, Glycine max
agcagttgatgaggcaaact

SEQ ID NO: 3008 - DNA, 20 bp, Glycine max
gcagttgatgaggcaaactt

SEQ ID NO: 3009 - DNA, 20 bp, Glycine max
gggatatagctacagcgtag

SEQ ID NO: 3010 - DNA, 20 bp, Glycine max
ggatatagctacagcgtagt

SEQ ID NO: 3011 - DNA, 20 bp, Glycine max
tatagctacagcgtagtggg

SEQ ID NO: 3012 - DNA, 20 bp, Glycine max
gtgatcttctccgctgtgtc

SEQ ID NO: 3013 - DNA, 20 bp, Glycine max
tgctgcgttgccagacacag

SEQ ID NO: 3014 - DNA, 20 bp, Glycine max
gaccagcagccaatttggag

SEQ ID NO: 3015 - DNA, 20 bp, Glycine max
gatcacattccactccaaat

SEQ ID NO: 3016 - DNA, 20 bp, Glycine max
attgggaccagcagccaatt

SEQ ID NO: 3017 - DNA, 20 bp, Glycine max
ttccactccaaattggctgc

SEQ ID NO: 3018 - DNA, 20 bp, Glycine max
aaattggctgctggtcccaa

SEQ ID NO: 3019 - DNA, 20 bp, Glycine max
ttggctgctggtcccaatgg

SEQ ID NO: 3020 - DNA, 20 bp, Glycine max
ttgccagcagagcctccatt

SEQ ID NO: 3021 - DNA, 20 bp, Glycine max
cttgccagcagagcctccat

SEQ ID NO: 3022 - DNA, 20 bp, Glycine max
ggtcccaatggaggctctgc

SEQ ID NO: 3023 - DNA, 20 bp, Glycine max
actgtcgaataccaaaccaa

SEQ ID NO: 3024 - DNA, 20 bp, Glycine max
gctgagcatctcctttggtt

SEQ ID NO: 3025 - DNA, 20 bp, Glycine max
gttgggctgagcatctcctt

SEQ ID NO: 3026 - DNA, 20 bp, Glycine max
gttttgagttggtcttggtt

SEQ ID NO: 3027 - DNA, 20 bp, Glycine max
agttttgagttggtcttggt

SEQ ID NO: 3028 - DNA, 20 bp, Glycine max
ttccagttttgagttggtct

SEQ ID NO: 3029 - DNA, 20 bp, Glycine max
tggcttttccagttttgagt

SEQ ID NO: 3030 - DNA, 20 bp, Glycine max
aaccaagaccaactcaaaac

SEQ ID NO: 3031 - DNA, 20 bp, Glycine max
actcaaaactggaaaagcca

SEQ ID NO: 3032 - DNA, 20 bp, Glycine max
cttgaagagagcatcagcct

SEQ ID NO: 3033 - DNA, 20 bp, Glycine max
caaggctgatgctctcttca

SEQ ID NO: 3034 - DNA, 20 bp, Glycine max
tgctctcttcaaggccattg

SEQ ID NO: 3035 - DNA, 20 bp, Glycine max
ggccaaaaggtaagcctcaa

SEQ ID NO: 3036 - DNA, 20 bp, Glycine max
ggccattgaggcttaccttt

SEQ ID NO: 3037 - DNA, 20 bp, Glycine max
tgtaatcgggattggccaaa

SEQ ID NO: 3038 - DNA, 20 bp, Glycine max
ggattagttgtaatcgggat

SEQ ID NO: 3039 - DNA, 20 bp, Glycine max
gaattggattagttgtaatc

SEQ ID NO: 3040 - DNA, 20 bp, Glycine max
cgaattggattagttgtaat

SEQ ID NO: 3041 - DNA, 20 bp, Glycine max
aatcatgaagttgatcgaat

SEQ ID NO: 3042 - DNA, 20 bp, Glycine max
aaatcaacaaattataataa

SEQ ID NO: 3043 - DNA, 2162 bp, Glycine max
tctctttctacttcttcatggcagagtcaccaaccttcaaagtccatgaagtctgctccatttcgccgccacaagaaaccccaccaacaactcttcccttcaccctcttcgacgtcctatggcttcggttccccccagtggagcgtctcttcttctattccttcccaaacccaacaacaacatcatttttcgacaccaccgttctcccaaatctcaaacactccctctccctcactctccaccacttccctcctctcgccggcaccatcacatggcccaatcactcacccctccctctcataacctacactcccggcaacaccatccccttcacaatcgcccaatccaacgcagatttcaacaccctctcttcaaacctctctcaagtcaaccaccacctccaaaacctaataccccacttaaccatttcccatgaagaagcttccgtgttagcacttcaactcaccctcttccccaaccaaggcttttcgattggaatcacaacccaccacgctgcacttgatggaaagtcttcgactttgttcatcaaatcgtgggcgcatttttgttctcagcttaatacctccccagaagaaccgttatcactaccaaagcatctaataccctcgtttgatagatctgttataagagacactttggggatcggtgagatttacgcgaactcatggatgaacttcggtggagccaccaatgaccgaagcttgaatgtgtgggattccctcggtggaagtcaaaccgatttggttaaaggtaatctattctaaacatcacatcgatatctctaattttttttttctatatttcttcatggtacagaaaaaattgttgcacagaacttgctaatagcaacattaaaatttgatcgagtatttaatcatcttcactttcagcatccattaaatatggttattaatcttctgattgatcaaacaattaattcgtattatatcgtctcatataattattttttttgtaacaaatagcaaagcttgtctaaaggtaatcctattttcaacattccattaacatttctctctttttttttctgaaataaacgcacacaaaactgtacgaataacaaaagtgaaattttgaatggtatttaatcttcttttccaacattcatgtatggttattaattatctgattggtcaaacaaattagttcatcgcgtgattttatttcttcgtaacaaacagaaaagctcgtcttaatatcttttttttttactctttggttaaagggttgttcgagttgacaccgttggatatcaagaagctgaagaaattagcggagtctaaggttgttgtcggagacaacaagaagaagattagggtgacatcgttcacggtcacgtgcgcttacttgttgtcatgcgcggtgaaagcggagcaacccaactgcgaaagagtgccttttattttcagcgtggactgtagggcgcgtttggatccaccaattccgggaacgtactttgggaacagcgtcgtgtctttgttggtgatagcaaagcgagaagagctattgggggaagaagcgttttttaaaagcgttttagggataagcgaagagttgaacaggatagagggtgacgtgttgaacggtgcggacaggtggatgccgaagattcaatcggtgatgtcggagaggccgaggttgttctctgttgcggggtctccgaggtttgaggtttacgatgttgactttgggtggggaaggcctaagaaatggatgttacttccgttgataaaacgggtgcgttttcactttcggagactagggatcacagtggaggcattcaaattgggttggcgttgaccaagagtcaaatggaggcgttttctacggtttttgctcaagggcttgagtccttggaataaatatgatgatgatgatgatgatggaggctttcaaacttggttggtggggtttcgaagaatctattgtaagaggagaagaggatattcttgaatctcgatgtttgcggaaaaaaagaactactaagatgaggttatagccttcattaaataagtttcaataattttatgggttagtatatgaatatttatatatatcatgagatgagatacatgagttcactacaaaaaaaaaacaagagttgatttacgtttttgtttcaa

SEQ ID NO: 3044 - DNA, 1392 bp, Glycine max
atggcagagtcaccaaccttcaaagtccatgaagtctgctccatttcgccgccacaagaaaccccaccaacaactcttcccttcaccctcttcgacgtcctatggcttcggttccccccagtggagcgtctcttcttctattccttcccaaacccaacaacaacatcatttttcgacaccaccgttctcccaaatctcaaacactccctctccctcactctccaccacttccctcctctcgccggcaccatcacatggcccaatcactcacccctccctctcataacctacactcccggcaacaccatccccttcacaatcgcccaatccaacgcagatttcaacaccctctcttcaaacctctctcaagtcaaccaccacctccaaaacctaataccccacttaaccatttcccatgaagaagcttccgtgttagcacttcaactcaccctcttccccaaccaaggcttttcgattggaatcacaacccaccacgctgcacttgatggaaagtcttcgactttgttcatcaaatcgtgggcgcatttttgttctcagcttaatacctccccagaagaaccgttatcactaccaaagcatctaataccctcgtttgatagatctgttataagagacactttggggatcggtgagatttacgcgaactcatggatgaacttcggtggagccaccaatgaccgaagcttgaatgtgtgggattccctcggtggaagtcaaaccgatttggttaaagggttgttcgagttgacaccgttggatatcaagaagctgaagaaattagcggagtctaaggttgttgtcggagacaacaagaagaagattagggtgacatcgttcacggtcacgtgcgcttacttgttgtcatgcgcggtgaaagcggagcaacccaactgcgaaagagtgccttttattttcagcgtggactgtagggcgcgtttggatccaccaattccgggaacgtactttgggaacagcgtcgtgtctttgttggtgatagcaaagcgagaagagctattgggggaagaagcgttttttaaaagcgttttagggataagcgaagagttgaacaggatagagggtgacgtgttgaacggtgcggacaggtggatgccgaagattcaatcggtgatgtcggagaggccgaggttgttctctgttgcggggtctccgaggtttgaggtttacgatgttgactttgggtggggaaggcctaagaaagtggatgttacttccgttgataaaacgggtgcgttttcactttcggagactagggatcacagtggaggcattcaaattgggttggcgttgaccaagagtcaaatggaggcgttttctacggtttttgctcaagggcttgagtccttggaataa

SEQ ID NO: 3045 - protein, 463 aa, Glycine max
MAESPTFKVHEVCSISPPQETPPTTLPFTLFDVLWLRFPPVERLFFYSFPNPTTTSFFDTTVLPNLKHSLSLTLHHFPPLAGTITWPNHSPLPLITYTPGNTIPFTIAQSNADFNTLSSNLSQVNHHLQNLIPHLTISHEEASVLALQLTLFPNQGFSIGITTHHAALDGKSSTLFIKSWAHFCSQLNTSPEEPLSLPKHLIPSFDRSVIRDTLGIGEIYANSWMNFGGATNDRSLNVWDSLGGSQTDLVKGLFELTPLDIKKLKKLAESKVVVGDNKKKIRVTSFTVTCAYLLSCAVKAEQPNCERVPFIFSVDCRARLDPPIPGTYFGNSVVSLLVIAKREELLGEEAFFKSVLGISEELNRIEGDVLNGADRWMPKIQSVMSERPRLFSVAGSPRFEVYDVDFGWGRPKKVDVTSVDKTGAFSLSETRDHSGGIQIGLALTKSQMEAFSTVFAQGLESLE

SEQ ID NO: 3046 - DNA, 20 bp, Glycine max
acttcatggactttgaaggt

SEQ ID NO: 3047 - DNA, 20 bp, Glycine max
gcagacttcatggactttga

SEQ ID NO: 3048 - DNA, 20 bp, Glycine max
gcgaaatggagcagacttca

SEQ ID NO: 3049 - DNA, 20 bp, Glycine max
ggtttcttgtggcggcgaaa

SEQ ID NO: 3050 - DNA, 20 bp, Glycine max
gttggtggggtttcttgtgg

SEQ ID NO: 3051 - DNA, 20 bp, Glycine max
gttgttggtggggtttcttg

SEQ ID NO: 3052 - DNA, 20 bp, Glycine max
gaagggaagagttgttggtg

SEQ ID NO: 3053 - DNA, 20 bp, Glycine max
tgaagggaagagttgttggt

SEQ ID NO: 3054 - DNA, 20 bp, Glycine max
gtgaagggaagagttgttgg

SEQ ID NO: 3055 - DNA, 20 bp, Glycine max
agggtgaagggaagagttgt

SEQ ID NO: 3056 - DNA, 20 bp, Glycine max
aggacgtcgaagagggtgaa

SEQ ID NO: 3057 - DNA, 20 bp, Glycine max
taggacgtcgaagagggtga

SEQ ID NO: 3058 - DNA, 20 bp, Glycine max
aagccataggacgtcgaaga

SEQ ID NO: 3059 - DNA, 20 bp, Glycine max
gaagccataggacgtcgaag

SEQ ID NO: 3060 - DNA, 20 bp, Glycine max
tcaccctcttcgacgtccta

SEQ ID NO: 3061 - DNA, 20 bp, Glycine max
ctggggggaaccgaagccat

SEQ ID NO: 3062 - DNA, 20 bp, Glycine max
tcttcgacgtcctatggctt

SEQ ID NO: 3063 - DNA, 20 bp, Glycine max
atggcttcggttccccccag

SEQ ID NO: 3064 - DNA, 20 bp, Glycine max
agaagagacgctccactggg

SEQ ID NO: 3065 - DNA, 20 bp, Glycine max
aagaagagacgctccactgg

SEQ ID NO: 3066 - DNA, 20 bp, Glycine max
gaagaagagacgctccactg

SEQ ID NO: 3067 - DNA, 20 bp, Glycine max
agaagaagagacgctccact

SEQ ID NO: 3068 - DNA, 20 bp, Glycine max
tagaagaagagacgctccac

SEQ ID NO: 3069 - DNA, 20 bp, Glycine max
tgttgttgttgggtttggga

SEQ ID NO: 3070 - DNA, 20 bp, Glycine max
atgatgttgttgttgggttt

SEQ ID NO: 3071 - DNA, 20 bp, Glycine max
aatgatgttgttgttgggtt

SEQ ID NO: 3072 - DNA, 20 bp, Glycine max
cgaaaaatgatgttgttgtt

SEQ ID NO: 3073 - DNA, 20 bp, Glycine max
tcgaaaaatgatgttgttgt

SEQ ID NO: 3074 - DNA, 20 bp, Glycine max
tttgagatttgggagaacgg

SEQ ID NO: 3075 - DNA, 20 bp, Glycine max
gtgtttgagatttgggagaa

SEQ ID NO: 3076 - DNA, 20 bp, Glycine max
agagggagtgtttgagattt

SEQ ID NO: 3077 - DNA, 20 bp, Glycine max
gagagggagtgtttgagatt

SEQ ID NO: 3078 - DNA, 20 bp, Glycine max
gtggtggagagtgagggaga

SEQ ID NO: 3079 - DNA, 20 bp, Glycine max
agtggtggagagtgagggag

SEQ ID NO: 3080 - DNA, 20 bp, Glycine max
agggaagtggtggagagtga

SEQ ID NO: 3081 - DNA, 20 bp, Glycine max
gagggaagtggtggagagtg

SEQ ID NO: 3082 - DNA, 20 bp, Glycine max
cggcgagaggagggaagtgg

SEQ ID NO: 3083 - DNA, 20 bp, Glycine max
tgccggcgagaggagggaag

SEQ ID NO: 3084 - DNA, 20 bp, Glycine max
tgatggtgccggcgagagga

SEQ ID NO: 3085 - DNA, 20 bp, Glycine max
gtgatggtgccggcgagagg

SEQ ID NO: 3086 - DNA, 20 bp, Glycine max
caccacttccctcctctcgc

SEQ ID NO: 3087 - DNA, 20 bp, Glycine max
catgtgatggtgccggcgag

SEQ ID NO: 3088 - DNA, 20 bp, Glycine max
attgggccatgtgatggtgc

SEQ ID NO: 3089 - DNA, 20 bp, Glycine max
ctctcgccggcaccatcaca

SEQ ID NO: 3090 - DNA, 20 bp, Glycine max
tgagtgattgggccatgtga

SEQ ID NO: 3091 - DNA, 20 bp, Glycine max
agagggaggggtgagtgatt

SEQ ID NO: 3092 - DNA, 20 bp, Glycine max
gagagggaggggtgagtgat

SEQ ID NO: 3093 - DNA, 20 bp, Glycine max
gtgtaggttatgagagggag

SEQ ID NO: 3094 - DNA, 20 bp, Glycine max
agtgtaggttatgagaggga

SEQ ID NO: 3095 - DNA, 20 bp, Glycine max
gagtgtaggttatgagaggg

SEQ ID NO: 3096 - DNA, 20 bp, Glycine max
cgggagtgtaggttatgaga

SEQ ID NO: 3097 - DNA, 20 bp, Glycine max
ccgggagtgtaggttatgag

SEQ ID NO: 3098 - DNA, 20 bp, Glycine max
gatggtgttgccgggagtgt

SEQ ID NO: 3099 - DNA, 20 bp, Glycine max
cctctcataacctacactcc

SEQ ID NO: 3100 - DNA, 20 bp, Glycine max
gtgaaggggatggtgttgcc

SEQ ID NO: 3101 - DNA, 20 bp, Glycine max
tgtgaaggggatggtgttgc

SEQ ID NO: 3102 - DNA, 20 bp, Glycine max
ttgggcgattgtgaagggga

SEQ ID NO: 3103 - DNA, 20 bp, Glycine max
tggattgggcgattgtgaag

SEQ ID NO: 3104 - DNA, 20 bp, Glycine max
ttggattgggcgattgtgaa

SEQ ID NO: 3105 - DNA, 20 bp, Glycine max
gttggattgggcgattgtga

SEQ ID NO: 3106 - DNA, 20 bp, Glycine max
gttgaaatctgcgttggatt

SEQ ID NO: 3107 - DNA, 20 bp, Glycine max
tgttgaaatctgcgttggat

SEQ ID NO: 3108 - DNA, 20 bp, Glycine max
gagggtgttgaaatctgcgt

SEQ ID NO: 3109 - DNA, 20 bp, Glycine max
ttgagagaggtttgaagaga

SEQ ID NO: 3110 - DNA, 20 bp, Glycine max
cttgagagaggtttgaagag

SEQ ID NO: 3111 - DNA, 20 bp, Glycine max
ggtggtggttgacttgagag

SEQ ID NO: 3112 - DNA, 20 bp, Glycine max
gtattaggttttggaggtgg

SEQ ID NO: 3113 - DNA, 20 bp, Glycine max
ggggtattaggttttggagg

SEQ ID NO: 3114 - DNA, 20 bp, Glycine max
agtggggtattaggttttgg

SEQ ID NO: 3115 - DNA, 20 bp, Glycine max
ttaagtggggtattaggttt

SEQ ID NO: 3116 - DNA, 20 bp, Glycine max
aaatggttaagtggggtatt

SEQ ID NO: 3117 - DNA, 20 bp, Glycine max
tcatgggaaatggttaagtg

SEQ ID NO: 3118 - DNA, 20 bp, Glycine max
ttcatgggaaatggttaagt

SEQ ID NO: 3119 - DNA, 20 bp, Glycine max
cttcatgggaaatggttaag

SEQ ID NO: 3120 - DNA, 20 bp, Glycine max
ggaagcttcttcatgggaaa

SEQ ID NO: 3121 - DNA, 20 bp, Glycine max
taacacggaagcttcttcat

SEQ ID NO: 3122 - DNA, 20 bp, Glycine max
ctaacacggaagcttcttca

SEQ ID NO: 3123 - DNA, 20 bp, Glycine max
ggtgagttgaagtgctaaca

SEQ ID NO: 3124 - DNA, 20 bp, Glycine max
aaagccttggttggggaaga

SEQ ID NO: 3125 - DNA, 20 bp, Glycine max
aaaagccttggttggggaag

SEQ ID NO: 3126 - DNA, 20 bp, Glycine max
ctcaccctcttccccaacca

SEQ ID NO: 3127 - DNA, 20 bp, Glycine max
caatcgaaaagccttggttg

SEQ ID NO: 3128 - DNA, 20 bp, Glycine max
ccaatcgaaaagccttggtt

SEQ ID NO: 3129 - DNA, 20 bp, Glycine max
tccaatcgaaaagccttggt

SEQ ID NO: 3130 - DNA, 20 bp, Glycine max
tgattccaatcgaaaagcct

SEQ ID NO: 3131 - DNA, 20 bp, Glycine max
cccaaccaaggcttttcgat

SEQ ID NO: 3132 - DNA, 20 bp, Glycine max
tccatcaagtgcagcgtggt

SEQ ID NO: 3133 - DNA, 20 bp, Glycine max
ttccatcaagtgcagcgtgg

SEQ ID NO: 3134 - DNA, 20 bp, Glycine max
actttccatcaagtgcagcg

SEQ ID NO: 3135 - DNA, 20 bp, Glycine max
acccaccacgctgcacttga

SEQ ID NO: 3136 - DNA, 20 bp, Glycine max
cgactttgttcatcaaatcg

SEQ ID NO: 3137 - DNA, 20 bp, Glycine max
gactttgttcatcaaatcgt

SEQ ID NO: 3138 - DNA, 20 bp, Glycine max
tgataacggttcttctgggg

SEQ ID NO: 3139 - DNA, 20 bp, Glycine max
tagtgataacggttcttctg

SEQ ID NO: 3140 - DNA, 20 bp, Glycine max
gtagtgataacggttcttct

SEQ ID NO: 3141 - DNA, 20 bp, Glycine max
ggtagtgataacggttcttc

SEQ ID NO: 3142 - DNA, 20 bp, Glycine max
agatgctttggtagtgataa

SEQ ID NO: 3143 - DNA, 20 bp, Glycine max
aacgagggtattagatgctt

SEQ ID NO: 3144 - DNA, 20 bp, Glycine max
ataacagatctatcaaacga

SEQ ID NO: 3145 - DNA, 20 bp, Glycine max
tataacagatctatcaaacg

SEQ ID NO: 3146 - DNA, 20 bp, Glycine max
atctgttataagagacactt

SEQ ID NO: 3147 - DNA, 20 bp, Glycine max
tctgttataagagacacttt

SEQ ID NO: 3148 - DNA, 20 bp, Glycine max
ctgttataagagacactttg

SEQ ID NO: 3149 - DNA, 20 bp, Glycine max
ataagagacactttggggat

SEQ ID NO: 3150 - DNA, 20 bp, Glycine max
gtgagatttacgcgaactca

SEQ ID NO: 3151 - DNA, 20 bp, Glycine max
gcgaactcatggatgaactt

SEQ ID NO: 3152 - DNA, 20 bp, Glycine max
aactcatggatgaacttcgg

SEQ ID NO: 3153 - DNA, 20 bp, Glycine max
attcaagcttcggtcattgg

SEQ ID NO: 3154 - DNA, 20 bp, Glycine max
cacattcaagcttcggtcat

SEQ ID NO: 3155 - DNA, 20 bp, Glycine max
aatcccacacattcaagctt

SEQ ID NO: 3156 - DNA, 20 bp, Glycine max
atgaccgaagcttgaatgtg

SEQ ID NO: 3157 - DNA, 20 bp, Glycine max
tgaccgaagcttgaatgtgt

SEQ ID NO: 3158 - DNA, 20 bp, Glycine max
ttgaatgtgtgggattccct

SEQ ID NO: 3159 - DNA, 20 bp, Glycine max
aatgtgtgggattccctcgg

SEQ ID NO: 3160 - DNA, 20 bp, Glycine max
atcggtttgacttccaccga

SEQ ID NO: 3161 - DNA, 20 bp, Glycine max
aatcggtttgacttccaccg

SEQ ID NO: 3162 - DNA, 20 bp, Glycine max
cggtggaagtcaaaccgatt

SEQ ID NO: 3163 - DNA, 20 bp, Glycine max
tagattacctttaaccaaat

SEQ ID NO: 3164 - DNA, 20 bp, Glycine max
agtcaaaccgatttggttaa

SEQ ID NO: 3165 - DNA, 20 bp, Glycine max
tttttttctatatttcttca

SEQ ID NO: 3166 - DNA, 20 bp, Glycine max
agattaataaccatatttaa

SEQ ID NO: 3167 - DNA, 20 bp, Glycine max
ctttcagcatccattaaata

SEQ ID NO: 3168 - DNA, 20 bp, Glycine max
aaatagcaaagcttgtctaa

SEQ ID NO: 3169 - DNA, 20 bp, Glycine max
gttaatggaatgttgaaaat

SEQ ID NO: 3170 - DNA, 20 bp, Glycine max
aaaaaagagagaaatgttaa

SEQ ID NO: 3171 - DNA, 20 bp, Glycine max
aacaaaagtgaaattttgaa

SEQ ID NO: 3172 - DNA, 20 bp, Glycine max
taataaccatacatgaatgt

SEQ ID NO: 3173 - DNA, 20 bp, Glycine max
tcttttccaacattcatgta

SEQ ID NO: 3174 - DNA, 20 bp, Glycine max
atggttattaattatctgat

SEQ ID NO: 3175 - DNA, 20 bp, Glycine max
tatcttttttttttactctt

SEQ ID NO: 3176 - DNA, 20 bp, Glycine max
tttttttactctttggttaa

SEQ ID NO: 3177 - DNA, 20 bp, Glycine max
ttttttactctttggttaaa

SEQ ID NO: 3178 - DNA, 20 bp, Glycine max
gttgttcgagttgacaccgt

SEQ ID NO: 3179 - DNA, 20 bp, Glycine max
ttcagcttcttgatatccaa

SEQ ID NO: 3180 - DNA, 20 bp, Glycine max
caagaagctgaagaaattag

SEQ ID NO: 3181 - DNA, 20 bp, Glycine max
gaagaaattagcggagtcta

SEQ ID NO: 3182 - DNA, 20 bp, Glycine max
gcggagtctaaggttgttgt

SEQ ID NO: 3183 - DNA, 20 bp, Glycine max
gagacaacaagaagaagatt

SEQ ID NO: 3184 - DNA, 20 bp, Glycine max
agacaacaagaagaagatta

SEQ ID NO: 3185 - DNA, 20 bp, Glycine max
gattagggtgacatcgttca

SEQ ID NO: 3186 - DNA, 20 bp, Glycine max
cgcttacttgttgtcatgcg

SEQ ID NO: 3187 - DNA, 20 bp, Glycine max
gttgtcatgcgcggtgaaag

SEQ ID NO: 3188 - DNA, 20 bp, Glycine max
aaaggcactctttcgcagtt

SEQ ID NO: 3189 - DNA, 20 bp, Glycine max
aaaaggcactctttcgcagt

SEQ ID NO: 3190 - DNA, 20 bp, Glycine max
cagtccacgctgaaaataaa

SEQ ID NO: 3191 - DNA, 20 bp, Glycine max
agtgccttttattttcagcg

SEQ ID NO: 3192 - DNA, 20 bp, Glycine max
ttattttcagcgtggactgt

SEQ ID NO: 3193 - DNA, 20 bp, Glycine max
tattttcagcgtggactgta

SEQ ID NO: 3194 - DNA, 20 bp, Glycine max
cgtggactgtagggcgcgtt

SEQ ID NO: 3195 - DNA, 20 bp, Glycine max
aagtacgttcccggaattgg

SEQ ID NO: 3196 - DNA, 20 bp, Glycine max
gcgtttggatccaccaattc

SEQ ID NO: 3197 - DNA, 20 bp, Glycine max
cgtttggatccaccaattcc

SEQ ID NO: 3198 - DNA, 20 bp, Glycine max
ccaaagtacgttcccggaat

SEQ ID NO: 3199 - DNA, 20 bp, Glycine max
ctgttcccaaagtacgttcc

SEQ ID NO: 3200 - DNA, 20 bp, Glycine max
ccaattccgggaacgtactt

SEQ ID NO: 3201 - DNA, 20 bp, Glycine max
caattccgggaacgtacttt

SEQ ID NO: 3202 - DNA, 20 bp, Glycine max
gaacagcgtcgtgtctttgt

SEQ ID NO: 3203 - DNA, 20 bp, Glycine max
agcaaagcgagaagagctat

SEQ ID NO: 3204 - DNA, 20 bp, Glycine max
gcaaagcgagaagagctatt

SEQ ID NO: 3205 - DNA, 20 bp, Glycine max
caaagcgagaagagctattg

SEQ ID NO: 3206 - DNA, 20 bp, Glycine max
aaagcgagaagagctattgg

SEQ ID NO: 3207 - DNA, 20 bp, Glycine max
gcgttttttaaaagcgtttt

SEQ ID NO: 3208 - DNA, 20 bp, Glycine max
cgttttttaaaagcgtttta

SEQ ID NO: 3209 - DNA, 20 bp, Glycine max
ggataagcgaagagttgaac

SEQ ID NO: 3210 - DNA, 20 bp, Glycine max
cgaagagttgaacaggatag

SEQ ID NO: 3211 - DNA, 20 bp, Glycine max
gaagagttgaacaggataga

SEQ ID NO: 3212 - DNA, 20 bp, Glycine max
atagagggtgacgtgttgaa

SEQ ID NO: 3213 - DNA, 20 bp, Glycine max
gggtgacgtgttgaacggtg

SEQ ID NO: 3214 - DNA, 20 bp, Glycine max
acgtgttgaacggtgcggac

SEQ ID NO: 3215 - DNA, 20 bp, Glycine max
tgttgaacggtgcggacagg

SEQ ID NO: 3216 - DNA, 20 bp, Glycine max
gacatcaccgattgaatctt

SEQ ID NO: 3217 - DNA, 20 bp, Glycine max
gtggatgccgaagattcaat

SEQ ID NO: 3218 - DNA, 20 bp, Glycine max
gaagattcaatcggtgatgt

SEQ ID NO: 3219 - DNA, 20 bp, Glycine max
ttcaatcggtgatgtcggag

SEQ ID NO: 3220 - DNA, 20 bp, Glycine max
cggtgatgtcggagaggccg

SEQ ID NO: 3221 - DNA, 20 bp, Glycine max
cccgcaacagagaacaacct

SEQ ID NO: 3222 - DNA, 20 bp, Glycine max
gccgaggttgttctctgttg

SEQ ID NO: 3223 - DNA, 20 bp, Glycine max
ccgaggttgttctctgttgc

SEQ ID NO: 3224 - DNA, 20 bp, Glycine max
cgaggttgttctctgttgcg

SEQ ID NO: 3225 - DNA, 20 bp, Glycine max
tctctgttgcggggtctccg

SEQ ID NO: 3226 - DNA, 20 bp, Glycine max
acatcgtaaacctcaaacct

SEQ ID NO: 3227 - DNA, 20 bp, Glycine max
tgcggggtctccgaggtttg

SEQ ID NO: 3228 - DNA, 20 bp, Glycine max
gaggtttacgatgttgactt

SEQ ID NO: 3229 - DNA, 20 bp, Glycine max
aggtttacgatgttgacttt

SEQ ID NO: 3230 - DNA, 20 bp, Glycine max
tttacgatgttgactttggg

SEQ ID NO: 3231 - DNA, 20 bp, Glycine max
ttacgatgttgactttgggt

SEQ ID NO: 3232 - DNA, 20 bp, Glycine max
tacgatgttgactttgggtg

SEQ ID NO: 3233 - DNA, 20 bp, Glycine max
atgttgactttgggtgggga

SEQ ID NO: 3234 - DNA, 20 bp, Glycine max
ggtggggaaggcctaagaaa

SEQ ID NO: 3235 - DNA, 20 bp, Glycine max
ggaagtaacatccatttctt

SEQ ID NO: 3236 - DNA, 20 bp, Glycine max
aaacgcacccgttttatcaa

SEQ ID NO: 3237 - DNA, 20 bp, Glycine max
tgttacttccgttgataaaa

SEQ ID NO: 3238 - DNA, 20 bp, Glycine max
gttacttccgttgataaaac

SEQ ID NO: 3239 - DNA, 20 bp, Glycine max
aacgggtgcgttttcacttt

SEQ ID NO: 3240 - DNA, 20 bp, Glycine max
cgttttcactttcggagact

SEQ ID NO: 3241 - DNA, 20 bp, Glycine max
gttttcactttcggagacta

SEQ ID NO: 3242 - DNA, 20 bp, Glycine max
tcggagactagggatcacag

SEQ ID NO: 3243 - DNA, 20 bp, Glycine max
gagactagggatcacagtgg

SEQ ID NO: 3244 - DNA, 20 bp, Glycine max
cacagtggaggcattcaaat

SEQ ID NO: 3245 - DNA, 20 bp, Glycine max
acagtggaggcattcaaatt

SEQ ID NO: 3246 - DNA, 20 bp, Glycine max
tggaggcattcaaattgggt

SEQ ID NO: 3247 - DNA, 20 bp, Glycine max
aaacgcctccatttgactct

SEQ ID NO: 3248 - DNA, 20 bp, Glycine max
ggcgttgaccaagagtcaaa

SEQ ID NO: 3249 - DNA, 20 bp, Glycine max
gttgaccaagagtcaaatgg

SEQ ID NO: 3250 - DNA, 20 bp, Glycine max
tcaaatggaggcgttttcta

SEQ ID NO: 3251 - DNA, 20 bp, Glycine max
ttttctacggtttttgctca

SEQ ID NO: 3252 - DNA, 20 bp, Glycine max
tttctacggtttttgctcaa

SEQ ID NO: 3253 - DNA, 20 bp, Glycine max
tgctcaagggcttgagtcct

SEQ ID NO: 3254 - DNA, 20 bp, Glycine max
tcatcatcatatttattcca

SEQ ID NO: 3255 - DNA, 20 bp, Glycine max
tatgatgatgatgatgatga

SEQ ID NO: 3256 - DNA, 20 bp, Glycine max
gatgatgatgatgatgatgg

SEQ ID NO: 3257 - DNA, 20 bp, Glycine max
atgatggaggctttcaaact

SEQ ID NO: 3258 - DNA, 20 bp, Glycine max
tggaggctttcaaacttggt

SEQ ID NO: 3259 - DNA, 20 bp, Glycine max
aggctttcaaacttggttgg

SEQ ID NO: 3260 - DNA, 20 bp, Glycine max
ggctttcaaacttggttggt

SEQ ID NO: 3261 - DNA, 20 bp, Glycine max
gctttcaaacttggttggtg

SEQ ID NO: 3262 - DNA, 20 bp, Glycine max
ttcgaagaatctattgtaag

SEQ ID NO: 3263 - DNA, 20 bp, Glycine max
atctattgtaagaggagaag

SEQ ID NO: 3264 - DNA, 20 bp, Glycine max
ttcttgaatctcgatgtttg

SEQ ID NO: 3265 - DNA, 20 bp, Glycine max
aaaaaagaactactaagatg

SEQ ID NO: 3266 - DNA, 20 bp, Glycine max
tattgaaacttatttaatga

SEQ ID NO: 3267 - DNA, 20 bp, Glycine max
aataagtttcaataatttta

SEQ ID NO: 3268 - DNA, 20 bp, Glycine max
ataagtttcaataattttat
